(19) United States
(12) Patent Application Publication
(10) Pub. No.: US 2023/0348593 A1
(43) Pub. Date: Nov. 2, 2023

(54) ANTIBODY MOLECULES THAT BIND TO NKP30 AND USES THEREOF

(71) Applicant: Marengo Therapeutics, Inc., Cambridge, MA (US)

(72) Inventors: Andreas Loew, Boston, MA (US); Madan Katragadda, Acton, MA (US); Andrea Tiffany, Cambridge, MA (US)

(21) Appl. No.: 18/172,928

(22) Filed: Feb. 22, 2023

Related U.S. Application Data
(63) Continuation of application No. PCT/US2021/047574, filed on Aug. 25, 2021.
(60) Provisional application No. 63/070,782, filed on Aug. 26, 2020.

(51) Int. Cl. C07K 16/28; C07K 14/54

(52) U.S. Cl. CPC C07K 16/2803; C07K 14/54; C07K 14/5418; C07K 14/5434; C07K 14/5443; C07K 2317/31; C07K 2319/30

(57) ABSTRACT

Antibody molecules that specifically bind to NKp30 are disclosed. The anti-NKp30 antibody molecules can be used to treat, prevent and/or diagnose cancerous, autoimmune or infectious conditions and disorders.

### RELATED APPLICATIONS

[0001] This application is a continuation of International Application No. PCT/US2021/047574, filed Aug. 25, 2021, which claims the benefit of U.S. Provisional Application No. 63/070,782, filed on Aug. 26, 2020, the entire contents of which are hereby incorporated by reference.

### REFERENCE TO A SEQUENCE LISTING XML

[0002] This application contains a Sequence Listing which has been submitted electronically in XML format. The Sequence Listing XML is incorporated herein by reference. Said XML file, created on Feb. 15, 2023, is named 53676-741_301_SL.xml and is 1,794,186 bytes in size.

### BACKGROUND

[0003] Natural Killer (NK) cells recognize and destroy tumors and virus-infected cells in an antibody-independent manner. The regulation of NK cells is mediated by activating and inhibiting receptors on the NK cell surface. One family of activating receptors is the natural cytotoxicity receptors (NCRs) which include NKp30, NKp44 and NKp46.

[0004] Given the importance of immune checkpoint pathways in regulating an immune response, the need exists for developing novel agents that modulate the activity of immunoinhibitory proteins, such as PD-1, thus leading to activation of immune system. Such agents can be used, e.g., for cancer immunotherapy and treatment of other conditions, such as chronic infection.

### SUMMARY OF THE INVENTION

[0005] Provided herein, inter alia, in an aspect, is an isolated antibody molecule that binds to NKp30, comprising:
[0006] (a) a heavy chain complementarity determining region 1 (VHCDR1), a heavy chain complementarity determining region 2 (VHCDR2), and/or a heavy chain complementarity determining region 3 (VHCDR3) described in Table 8A, or a sequence with no more than 1, 2, 3, or 4 mutations, e.g., substitutions, additions, or deletions; and/or
[0007] (b) a light chain complementarity determining region 1 (VLCDR1), a light chain complementarity determining region 2 (VLCDR2), and/or a light chain complementarity determining region 3 (VLCDR3) described in Table 8B, or a sequence with no more than 1, 2, 3, or 4 mutations, e.g., substitutions, additions, or deletions.

[0008] In some embodiments, the VHCDR1 comprises the amino acid sequence of any one of SEQ ID NOs: 19, 33, 47, 61, 7397, 89, 103, and 116, or an amino acid sequence with no more than 1, 2, 3, or 4 mutations, e.g., substitutions, additions, or deletions

[0009] In some embodiments, the VHCDR2 comprises the amino acid sequence of any one of SEQ ID NOs: 21, 35, 49, 63, 7399, 91, 105, or 118, or an amino acid sequence with no more than 1, 2, 3, or 4 mutations, e.g., substitutions, additions, or deletions.

[0010] In some embodiments, the VHCDR3 comprises the amino acid sequence of any one of SEQ ID NOs: 23, 37, 51, 65, 79, 93, 107, and 120, or an amino acid sequence with no more than 1, 2, 3, or 4 mutations, e.g., substitutions, additions, or deletions.

[0011] In some embodiments, the VLCDR1 comprises the amino acid sequence of any one of SEQ ID NOs: 26, 40, 54, 68, 82, 96, 110, and 123, or an amino acid sequence with no more than 1, 2, 3, or 4 mutations, e.g., substitutions, additions, or deletions.

[0012] In some embodiments, the VLCDR2 comprises the amino acid sequence of any one of SEQ ID NOs: 28, 7393, 56, 70, 84, 98, 112, and 125, or an amino acid sequence with no more than 1, 2, 3, or 4 mutations, e.g., substitutions, additions, or deletions.

[0013] In some embodiments, the VLCDR3 comprises the amino acid sequence of any one of SEQ ID NOs: 30, 7395, 58, 72, 86, 100, 113, and 127, or an amino acid sequence with no more than 1, 2, 3, or 4 mutations, e.g., substitutions, additions, or deletions.

[0014] In some embodiments, the antibody molecule as described herein comprises:
[0015] (a) a heavy chain framework region 1 (VHFWR1), a heavy chain framework region 2 (VHFWR1), a heavy chain framework region 3 (VHFWR3), and/or a heavy chain framework region 4 (VHFWR4) described in Table 8A, or an amino acid sequence with no more than 1, 2, 3, or 4 mutations, e.g., substitutions, additions, or deletions; and/or
[0016] (b) a light chain framework region 1 (VLFWR1), a light chain framework region 2 (VLFWR1), a light chain framework region 3 (VLFWR3), and/or a light chain framework region 4 (VLFWR4) described in Table 8B, or an amino acid sequence with no more than 1, 2, 3, or 4 mutations, e.g., substitutions, additions, or deletions.

[0017] In some embodiments, the antibody molecule as described herein comprises:
[0018] (a) a heavy chain variable region (VH) described in Table 9, e.g., a VH comprising the amino acid sequence of any one of SEQ ID NOs: 1-8, or an amino acid sequence having at least about 75%, 80%, 85%, 90%, 95%, or 99% sequence identity thereto; and/or
[0019] (b) a light chain variable region (VL) described in Table 9, e.g., a VL comprising the amino acid sequence of any one of SEQ ID NOs: 9-16, or an amino acid sequence having at least about 75%, 80%, 85%, 90%, 95%, or 99% sequence identity thereto.

[0020] In some embodiments, the antibody molecule as described herein comprises an amino acid sequence described in Table 10, e.g., the amino acid sequence of any one of SEQ ID NOs: 17, and 7386-7392, or an amino acid sequence having at least about 75%, 80%, 85%, 90%, 95%, or 99% sequence identity thereto.

[0021] In another aspect, provides herein is a composition comprising a polypeptide molecule comprising the antibody molecule as described herein.

[0022] In some embodiments, the polypeptide molecule is a multifunctional polypeptide molecule.

[0023] In some embodiments, the polypeptide molecule is a multispecific polypeptide molecule.

[0024] In some embodiments, the polypeptide molecule further comprises a targeting moiety.

[0025] In some embodiments, the targeting moiety is selected from a tumor targeting moiety, a targeting moiety that that targets an autoreactive T cell, and a targeting moiety that targets an infected cell.

[0026] In some embodiments, the targeting moiety that targets the autoreactive T cell binds to an antigen present on the surface of the autoreactive T cell.

[0027] In some embodiments, the antigen present on the surface of the autoreactive T cell is associated with an inflammatory or autoimmune disorder.

[0028] In some embodiments, the antigen present on the surface of the autoreactive T cell is selected from the group consisting of CD3, TCRα, TCRβ, TCRγ, TCRζ, ICOS, CD28, CD27, HVEM, LIGHT, CD40, 4-1BB, OX40, DR3, GITR, CD30, TIM1, SLAM, CD2, and CD226.

[0029] In some embodiments, the targeting moiety that targets the infected cell binds to an antigen associated with a viral infection or a bacterial infection.

[0030] In some embodiments, the polypeptide molecule further comprises a cytokine molecule.

[0031] In some embodiments, the polypeptide molecule further comprises one, two, three, four or more of:
[0032] (a) a tumor targeting moiety, e.g., as described herein;
[0033] (b) a cytokine molecule, e.g., as described herein;
[0034] (c) a T cell engager, e.g., as described herein; or
[0035] (d) a stromal modifying moiety, e.g., as described herein.

[0036] In some embodiments, the cytokine molecule is a cytokine molecule selected from the group consisting of GM-CSF, IL-1α, IL-1β, IL-2, IL-3, IL-4, IL-5, IL-6, IL-7, IL-8, IL-10, IL-12, IL-15, IL-18, IL-21, IFN-α, IFN-β, IFN-γ, MIP-1α, MIP-1β, TGF-β, TNF-α, and TNFβ.

[0037] In some embodiments, the antibody molecule is a monospecific antibody molecule, a bispecific antibody molecule, or a trispecific antibody molecule.

[0038] In some embodiments, the antibody molecule is a monovalent antibody molecule, a bivalent antibody molecule, or a trivalent antibody molecule.

[0039] In some embodiments, the antibody molecule is a full antibody (e.g., an antibody that includes at least one, and preferably two, complete heavy chains, and at least one, and preferably two, complete light chains), or an antigen-binding fragment (e.g., a Fab, F(ab′)2, Fv, a single chain Fv, a single domain antibody, a diabody (dAb), a bivalent antibody, or bispecific antibody or fragment thereof, a single domain variant thereof, or a camelid antibody).

[0040] In some embodiments, the antibody comprises a heavy chain constant region chosen from IgG1, IgG2, IgG3, or IgG4, or a fragment thereof.

[0041] In some embodiments, the antibody comprises a light chain constant region chosen from the light chain constant regions of kappa or lambda, or a fragment thereof.

[0042] In some embodiments, the immunoglobulin chain constant region (e.g., Fc region) is altered, e.g., mutated, to increase or decrease one or more of: Fc receptor binding, antibody glycosylation, the number of cysteine residues, effector cell function, or complement function.

[0043] In some embodiments, an interface of a first and second immunoglobulin chain constant regions (e.g., Fc region) is altered, e.g., mutated, to increase or decrease dimerization, e.g., relative to a non-engineered interface.

[0044] In some embodiments, the dimerization of the immunoglobulin chain constant region (e.g., Fc region) is enhanced by providing an Fc interface of a first and a second Fc region with one or more of: a paired cavity-protuberance (“knob-in-a hole”), an electrostatic interaction, or a strand-exchange, such that a greater ratio of heteromultimer:homomultimer forms, e.g., relative to a non-engineered interface.

[0045] In some embodiments, the immunoglobulin chain constant region (e.g., Fc region) comprises an amino acid substitution at a position chosen from one or more of 347, 349, 350, 351, 366, 368, 370, 392, 394, 395, 397, 398, 399, 405, 407, or 409, e.g., of the Fc region of human IgG1.

[0046] In some embodiments, the immunoglobulin chain constant region (e.g., Fc region) comprises an amino acid substitution chosen from: T366S, L368A, or Y407V (e.g., corresponding to a cavity or hole), or T366W (e.g., corresponding to a protuberance or knob), or a combination thereof.

[0047] In some embodiments, the antibody molecule or the polypeptide molecule further comprises a linker, e.g., a linker between one or more of: the targeting moiety and the cytokine molecule or the stromal modifying moiety, the targeting moiety and the immune cell engager, the cytokine molecule or the stromal modifying moiety, and the immune cell engager, the cytokine molecule or the stromal modifying moiety and the immunoglobulin chain constant region (e.g., the Fc region), the targeting moiety and the immunoglobulin chain constant region, or the immune cell engager and the immunoglobulin chain constant region.

[0048] In some embodiments, the linker is selected from: a cleavable linker, a non-cleavable linker, a peptide linker, a flexible linker, a rigid linker, a helical linker, or a non-helical linker.

[0049] In some embodiments, the linker is a peptide linker.

[0050] In some embodiments, the peptide linker comprises Gly and Ser.

[0051] In another aspect, provides herein is an isolated nucleic acid molecule, which comprises the nucleotide sequence encoding any one of the antibody molecules or the polypeptide molecule described herein, or a nucleotide sequence substantially homologous thereto (e.g., at least 95% to 99.9% identical thereto).

[0052] In another aspect, provides herein is an isolated nucleic acid encoding the antibody molecule as described herein, or the polypeptide molecule of the composition as described herein.

[0053] In another aspect, provides herein is a vector, e.g., an expression vector, comprising one or more of the nucleic acid molecules as described herein.

[0054] In another aspect, provides herein is a host cell comprising the nucleic acid molecule as described herein, or the vector as described herein.

[0055] In another aspect, provides herein is a method of making, e.g., producing, the antibody molecule as described herein or the composition as described herein, comprising culturing the host cell as described herein, under suitable conditions, e.g., conditions suitable for gene expression and/or homo- or heterodimerization.

[0056] In another aspect, provides herein is a pharmaceutical composition comprising the antibody molecule as described herein, the composition as described herein, the nucleic acid molecule as described herein, or the host cell as described herein, and a pharmaceutically acceptable carrier, excipient, diluent, or stabilizer.

[0057] In another aspect, provides herein is a method of treating a cancer, comprising administering to a subject in need thereof the antibody molecule as described herein, the composition as described herein, or the pharmaceutical composition as described herein, wherein the antibody molecule, the composition, or the pharmaceutical composition is administered in an amount effective to treat the cancer.

[0058] In another aspect, provides herein is the antibody molecule as described herein or the composition as described herein for use in treating cancer.

[0059] In some embodiments, the cancer is a solid tumor cancer, or a metastatic lesion.

[0060] Unless otherwise defined, all technical and scientific terms used herein have the same meaning as commonly understood by one of ordinary skill in the art to which this invention belongs. Although methods and materials similar or equivalent to those described herein can be used in the practice or testing of the present invention, suitable methods and materials are described below. All publications, patent applications, patents, and other references mentioned herein are incorporated by reference in their entirety. In the case of conflict, the present specification, including definitions, will control. In addition, the materials, methods, and examples are illustrative only and are not intended to be limiting.

[0061] Other features and advantages of the invention will be apparent from the following detailed description and claims.

### BRIEF DESCRIPTION OF THE DRAWINGS

[0062] FIG. 1 is a graph showing binding of NKp30 antibodies to NK92 cells. Data was calculated as the percent-AF747 positive population.

[0063] FIG. 2 is a graph showing activation of NK92 cells by NKp30 antibodies. Data were generated using hamster anti-NKp30 mAbs.

### DETAILED DESCRIPTION OF THE INVENTION

### Definitions

[0064] Certain terms are defined below.

[0065] As used herein, the articles “a” and “an” refer to one or more than one, e.g., to at least one, of the grammatical object of the article. The use of the words “a” or “an” when used in conjunction with the term “comprising” herein may mean “one,” but it is also consistent with the meaning of “one or more,” “at least one,” and “one or more than one.”

[0066] As used herein, “about” and “approximately” generally mean an acceptable degree of error for the quantity measured given the nature or precision of the measurements. Exemplary degrees of error are within 20 percent (%), typically, within 10%, and more typically, within 5% of a given range of values.

[0067] As used herein, the term “molecule” as used in, e.g., antibody molecule, cytokine molecule, receptor molecule, includes full-length, naturally-occurring molecules, as well as variants, e.g., functional variants (e.g., truncations, fragments, mutated (e.g., substantially similar sequences) or derivatized form thereof), so long as at least one function and/or activity of the unmodified (e.g., naturally-occurring) molecule remains.

[0068] “Antibody molecule” as used herein refers to a protein, e.g., an immunoglobulin chain or fragment thereof, comprising at least one immunoglobulin variable domain sequence. An antibody molecule encompasses antibodies (e.g., full-length antibodies) and antibody fragments. In an embodiment, an antibody molecule comprises an antigen binding or functional fragment of a full-length antibody, or a full-length immunoglobulin chain. For example, a full-length antibody is an immunoglobulin (Ig) molecule (e.g., an IgG antibody) that is naturally occurring or formed by normal immunoglobulin gene fragment recombinatorial processes). In embodiments, an antibody molecule refers to an immunologically active, antigen-binding portion of an immunoglobulin molecule, such as an antibody fragment. An antibody fragment, e.g., functional fragment, is a portion of an antibody, e.g., Fab, Fab′, F(ab′)₂, F(ab)₂, variable fragment (Fv), domain antibody (dAb), or single chain variable fragment (scFv). A functional antibody fragment binds to the same antigen as that recognized by the intact (e.g., full-length) antibody. The terms “antibody fragment” or “functional fragment” also include isolated fragments consisting of the variable regions, such as the “Fv” fragments consisting of the variable regions of the heavy and light chains or recombinant single chain polypeptide molecules in which light and heavy variable regions are connected by a peptide linker (“scFv proteins”). In some embodiments, an antibody fragment does not include portions of antibodies without antigen binding activity, such as Fc fragments or single amino acid residues. Exemplary antibody molecules include full length antibodies and antibody fragments, e.g., dAb (domain antibody), single chain, Fab, Fab′, and F(ab′)₂ fragments, and single chain variable fragments (scFvs).

[0069] As used herein, an “immunoglobulin variable domain sequence” refers to an amino acid sequence which can form the structure of an immunoglobulin variable domain. For example, the sequence may include all or part of the amino acid sequence of a naturally-occurring variable domain. For example, the sequence may or may not include one, two, or more N- or C-terminal amino acids, or may include other alterations that are compatible with formation of the protein structure.

[0070] In embodiments, an antibody molecule is monospecific, e.g., it comprises binding specificity for a single epitope. In some embodiments, an antibody molecule is multispecific, e.g., it comprises a plurality of immunoglobulin variable domain sequences, where a first immunoglobulin variable domain sequence has binding specificity for a first epitope and a second immunoglobulin variable domain sequence has binding specificity for a second epitope. In some embodiments, an antibody molecule is a bispecific antibody molecule. “Bispecific antibody molecule” as used herein refers to an antibody molecule that has specificity for more than one (e.g., two, three, four, or more) epitope and/or antigen.

[0071] “Antigen” (Ag) as used herein refers to a molecule that can provoke an immune response, e.g., involving activation of certain immune cells and/or antibody generation. Any macromolecule, including almost all proteins or peptides, can be an antigen. Antigens can also be derived from genomic recombinant or DNA. For example, any DNA comprising a nucleotide sequence or a partial nucleotide sequence that encodes a protein capable of eliciting an immune response encodes an “antigen.” In embodiments, an antigen does not need to be encoded solely by a full-length nucleotide sequence of a gene, nor does an antigen need to be encoded by a gene at all. In embodiments, an antigen can be synthesized or can be derived from a biological sample, e.g., a tissue sample, a tumor sample, a cell, or a fluid with other biological components. As used, herein a “tumor antigen” or interchangeably, a “cancer antigen” includes any molecule present on, or associated with, a cancer, e.g., a cancer cell or a tumor microenvironment that can provoke an immune response. As used, herein an “immune cell antigen” includes any molecule present on, or associated with, an immune cell that can provoke an immune response.

[0072] The “antigen-binding site,” or “binding portion” of an antibody molecule refers to the part of an antibody molecule, e.g., an immunoglobulin (Ig) molecule, that participates in antigen binding. In embodiments, the antigen binding site is formed by amino acid residues of the variable (V) regions of the heavy (H) and light (L) chains. Three highly divergent stretches within the variable regions of the heavy and light chains, referred to as hypervariable regions, are disposed between more conserved flanking stretches called “framework regions,” (FRs). FRs are amino acid sequences that are naturally found between, and adjacent to, hypervariable regions in immunoglobulins. In embodiments, in an antibody molecule, the three hypervariable regions of a light chain and the three hypervariable regions of a heavy chain are disposed relative to each other in three dimensional space to form an antigen-binding surface, which is complementary to the three-dimensional surface of a bound antigen. The three hypervariable regions of each of the heavy and light chains are referred to as “complementarity-determining regions,” or “CDRs.” The framework region and CDRs have been defined and described, e.g., in Kabat, E.A., et al. (1991) Sequences of Proteins of Immunological Interest, Fifth Edition, U.S. Department of Health and Human Services, NIH Publication No. 91-3242, and Chothia, C. et al. (1987) J. Mol. Biol. 196:901-917. Each variable chain (e.g., variable heavy chain and variable light chain) is typically made up of three CDRs and four FRs, arranged from amino-terminus to carboxy-terminus in the amino acid order: FR1, CDR1, FR2, CDR2, FR3, CDR3, and FR4.

[0073] “Cancer” as used herein can encompass all types of oncogenic processes and/or cancerous growths. In embodiments, cancer includes primary tumors as well as metastatic tissues or malignantly transformed cells, tissues, or organs. In embodiments, cancer encompasses all histopathologies and stages, e.g., stages of invasiveness/severity, of a cancer. In embodiments, cancer includes relapsed and/or resistant cancer. The terms “cancer” and “tumor” can be used interchangeably. For example, both terms encompass solid and liquid tumors. As used herein, the term “cancer” or “tumor” includes premalignant, as well as malignant cancers and tumors.

[0074] As used herein, an “immune cell” refers to any of various cells that function in the immune system, e.g., to protect against agents of infection and foreign matter. In embodiments, this term includes leukocytes, e.g., neutrophils, eosinophils, basophils, lymphocytes, and monocytes. Innate leukocytes include phagocytes (e.g., macrophages, neutrophils, and dendritic cells), mast cells, eosinophils, basophils, and natural killer cells. Innate leukocytes identify and eliminate pathogens, either by attacking larger pathogens through contact or by engulfing and then killing microorganisms, and are mediators in the activation of an adaptive immune response. The cells of the adaptive immune system are special types of leukocytes, called lymphocytes. B cells and T cells are important types of lymphocytes and are derived from hematopoietic stem cells in the bone marrow. B cells are involved in the humoral immune response, whereas T cells are involved in cell-mediated immune response. The term “immune cell” includes immune effector cells.

[0075] “Immune effector cell,” as that term is used herein, refers to a cell that is involved in an immune response, e.g., in the promotion of an immune effector response. Examples of immune effector cells include, but are not limited to, T cells, e.g., alpha/beta T cells and gamma/delta T cells, B cells, natural killer (NK) cells, natural killer T (NK T) cells, and mast cells.

[0076] The term “effector function” or “effector response” refers to a specialized function of a cell. Effector function of a T cell, for example, may be cytolytic activity or helper activity including the secretion of cytokines.

[0077] The compositions and methods of the present invention encompass polypeptides and nucleic acids having the sequences specified, or sequences substantially identical or similar thereto, e.g., sequences at least 80%, 85%, 90%, 95% identical or higher to the sequence specified. In the context of an amino acid sequence, the term “substantially identical” is used herein to refer to a first amino acid that contains a sufficient or minimum number of amino acid residues that are i) identical to, or ii) conservative substitutions of aligned amino acid residues in a second amino acid sequence such that the first and second amino acid sequences can have a common structural domain and/or common functional activity. For example, amino acid sequences that contain a common structural domain having at least about 80%, 85%, 90%. 91%, 92%, 93%, 94%, 95%, 96%, 97%, 98% or 99% identity to a reference sequence, e.g., a sequence provided herein.

[0078] In the context of nucleotide sequence, the term “substantially identical” is used herein to refer to a first nucleic acid sequence that contains a sufficient or minimum number of nucleotides that are identical to aligned nucleotides in a second nucleic acid sequence such that the first and second nucleotide sequences encode a polypeptide having common functional activity, or encode a common structural polypeptide domain or a common functional polypeptide activity. For example, nucleotide sequences having at least about 80%, 85%, 90%, 91%, 92%, 93%, 94%, 95%, 96%, 97%, 98% or 99% identity to a reference sequence, e.g., a sequence provided herein.

[0079] The term “variant” refers to a polypeptide that has a substantially identical amino acid sequence to a reference amino acid sequence, or is encoded by a substantially identical nucleotide sequence. In some embodiments, the variant is a functional variant.

[0080] The term “functional variant” refers to a polypeptide that has a substantially identical amino acid sequence to a reference amino acid sequence, or is encoded by a substantially identical nucleotide sequence, and is capable of having one or more activities of the reference amino acid sequence.

[0081] Calculations of homology or sequence identity between sequences (the terms are used interchangeably herein) are performed as follows.

[0082] To determine the percent identity of two amino acid sequences, or of two nucleic acid sequences, the sequences are aligned for optimal comparison purposes (e.g., gaps can be introduced in one or both of a first and a second amino acid or nucleic acid sequence for optimal alignment and non-homologous sequences can be disregarded for comparison purposes). In a preferred embodiment, the length of a reference sequence aligned for comparison purposes is at least 30%, preferably at least 40%, more preferably at least 50%, 60%, and even more preferably at least 70%, 80%, 90%, 100% of the length of the reference sequence. The amino acid residues or nucleotides at corresponding amino acid positions or nucleotide positions are then compared. When a position in the first sequence is occupied by the same amino acid residue or nucleotide as the corresponding position in the second sequence, then the molecules are identical at that position (as used herein amino acid or nucleic acid “identity” is equivalent to amino acid or nucleic acid “homology”).

[0083] The percent identity between the two sequences is a function of the number of identical positions shared by the sequences, taking into account the number of gaps, and the length of each gap, which need to be introduced for optimal alignment of the two sequences.

[0084] The comparison of sequences and determination of percent identity between two sequences can be accomplished using a mathematical algorithm. In a preferred embodiment, the percent identity between two amino acid sequences is determined using the Needleman and Wunsch ((1970) J. Mol. Biol. 48:444-453 ) algorithm which has been incorporated into the GAP program in the GCG software package (available at www.gcg.com), using either a Blossum 62 matrix or a PAM250 matrix, and a gap weight of 16, 14, 12, 10, 8, 6, or 4 and a length weight of 1, 2, 3, 4, 5, or 6. In yet another preferred embodiment, the percent identity between two nucleotide sequences is determined using the GAP program in the GCG software package (available at www.gcg.com), using a NWSgapdna.CMP matrix and a gap weight of 40, 50, 60, 70, or 80 and a length weight of 1, 2, 3, 4, 5, or 6. A particularly preferred set of parameters (and the one that should be used unless otherwise specified) are a Blossum 62 scoring matrix with a gap penalty of 12, a gap extend penalty of 4, and a frameshift gap penalty of 5.

[0085] The percent identity between two amino acid or nucleotide sequences can be determined using the algorithm of E. Meyers and W. Miller ((1989) CABIOS, 4:11-17) which has been incorporated into the ALIGN program (version 2.0), using a PAM120 weight residue table, a gap length penalty of 12 and a gap penalty of 4.

[0086] The nucleic acid and protein sequences described herein can be used as a “query sequence” to perform a search against public databases to, for example, identify other family members or related sequences. Such searches can be performed using the NBLAST and XBLAST programs (version 2.0) of Altschul, et al. (1990) J. Mol. Biol. 215:403-10. BLAST nucleotide searches can be performed with the NBLAST program, score = 100, wordlength = 12 to obtain nucleotide sequences homologous to a nucleic acid molecule of the invention. BLAST protein searches can be performed with the XBLAST program, score = 50, wordlength = 3 to obtain amino acid sequences homologous to protein molecules of the invention. To obtain gapped alignments for comparison purposes, Gapped BLAST can be utilized as described in Altschul et al., (1997) Nucleic Acids Res. 25:3389-3402. When utilizing BLAST and Gapped BLAST programs, the default parameters of the respective programs (e.g., XBLAST and NBLAST) can be used. See ncbi.nlm.nih.gov.

[0087] It is understood that the molecules of the present invention may have additional conservative or non-essential amino acid substitutions, which do not have a substantial effect on their functions.

[0088] The term “amino acid” is intended to embrace all molecules, whether natural or synthetic, which include both an amino functionality and an acid functionality and capable of being included in a polymer of naturally-occurring amino acids. Exemplary amino acids include naturally-occurring amino acids; analogs, derivatives and congeners thereof; amino acid analogs having variant side chains; and all stereoisomers of any of any of the foregoing. As used herein the term “amino acid” includes both the D- or L- optical isomers and peptidomimetics.

[0089] A “conservative amino acid substitution” is one in which the amino acid residue is replaced with an amino acid residue having a similar side chain. Families of amino acid residues having similar side chains have been defined in the art. These families include amino acids with basic side chains (e.g., lysine, arginine, histidine), acidic side chains (e.g., aspartic acid, glutamic acid), uncharged polar side chains (e.g., glycine, asparagine, glutamine, serine, threonine, tyrosine, cysteine), nonpolar side chains (e.g., alanine, valine, leucine, isoleucine, proline, phenylalanine, methionine, tryptophan), beta-branched side chains (e.g., threonine, valine, isoleucine) and aromatic side chains (e.g., tyrosine, phenylalanine, tryptophan, histidine).

[0090] The terms “polypeptide”, “peptide” and “protein” (if single chain) are used interchangeably herein to refer to polymers of amino acids of any length. The polymer may be linear or branched, it may comprise modified amino acids, and it may be interrupted by non-amino acids. The terms also encompass an amino acid polymer that has been modified; for example, disulfide bond formation, glycosylation, lipidation, acetylation, phosphorylation, or any other manipulation, such as conjugation with a labeling component. The polypeptide can be isolated from natural sources, can be a produced by recombinant techniques from a eukaryotic or prokaryotic host, or can be a product of synthetic procedures.

[0091] The terms “nucleic acid,” “nucleic acid sequence,” “nucleotide sequence,” or “polynucleotide sequence,” and “polynucleotide” are used interchangeably. They refer to a polymeric form of nucleotides of any length, either deoxyribonucleotides or ribonucleotides, or analogs thereof. The polynucleotide may be either single-stranded or double-stranded, and if single-stranded may be the coding strand or non-coding (antisense) strand. A polynucleotide may comprise modified nucleotides, such as methylated nucleotides and nucleotide analogs. The sequence of nucleotides may be interrupted by non-nucleotide components. A polynucleotide may be further modified after polymerization, such as by conjugation with a labeling component. The nucleic acid may be a recombinant polynucleotide, or a polynucleotide of genomic, cDNA, semisynthetic, or synthetic origin which either does not occur in nature or is linked to another polynucleotide in a non-natural arrangement.

[0092] The term “isolated,” as used herein, refers to material that is removed from its original or native environment (e.g., the natural environment if it is naturally occurring). For example, a naturally-occurring polynucleotide or polypeptide present in a living animal is not isolated, but the same polynucleotide or polypeptide, separated by human intervention from some or all of the co-existing materials in the natural system, is isolated. Such polynucleotides could be part of a vector and/or such polynucleotides or polypeptides could be part of a composition, and still be isolated in that such vector or composition is not part of the environment in which it is found in nature.

[0093] Various aspects of the invention are described in further detail below. Additional definitions are set out throughout the specification.

### Natural Killer Cell Engagers

[0094] Natural Killer (NK) cells recognize and destroy tumors and virus-infected cells in an antibody-independent manner. The regulation of NK cells is mediated by activating and inhibiting receptors on the NK cell surface. One family of activating receptors is the natural cytotoxicity receptors (NCRs) which include NKp30, NKp44 and NKp46. The NCRs initiate tumor targeting by recognition of heparan sulfate on cancer cells. NKG2D is a receptor that provides both stimulatory and costimulatory innate immune responses on activated killer (NK) cells, leading to cytotoxic activity. DNAM1 is a receptor involved in intercellular adhesion, lymphocyte signaling, cytotoxicity and lymphokine secretion mediated by cytotoxic T-lymphocyte (CTL) and NK cell. DAP10 (also known as HCST) is a transmembrane adapter protein which associates with KLRK1 to form an activation receptor KLRK1-HCST in lymphoid and myeloid cells; this receptor plays a major role in triggering cytotoxicity against target cells expressing cell surface ligands such as MHC class I chain-related MICA and MICB, and U(optionally L1)6-binding proteins (ULBPs); it KLRK1-HCST receptor plays a role in immune surveillance against tumors and is required for cytolysis of tumors cells; indeed, melanoma cells that do not express KLRK1 ligands escape from immune surveillance mediated by NK cells. CD16 is a receptor for the Fc region of IgG, which binds complexed or aggregated IgG and also monomeric IgG and thereby mediates antibody-dependent cellular cytotoxicity (ADCC) and other antibody-dependent responses, such as phagocytosis.

[0095] The present disclosure provides, inter alia, antibody molecules, e.g., multispecific (e.g., bi-, tri-, quad- specific) or multifunctional molecules, that are engineered to contain one or more NK cell engagers that mediate binding to and/or activation of an NK cell. Accordingly, in some embodiments, the NK cell engager is selected from an antigen binding domain or ligand that binds to (e.g., activates): NKp30, NKp40, NKp44, NKp46, NKG2D, DNAM1, DAP10, CD16 (e.g., CD16a, CD16b, or both), CRTAM, CD27, PSGL1, CD96, CD100 (SEMA4D), NKp80, CD244 (also known as SLAMF4 or 2B4), SLAMF6, SLAMF7, KIR2DS2, KIR2DS4, KIR3DS1, KIR2DS3, KIR2DS5, KIR2DS1, CD94, NKG2C, NKG2E, or CD160.

[0096] In some embodiments, the NK cell engager is an antigen binding domain that binds to NKp30 (e.g., NKp30 present, e.g., expressed or displayed, on the surface of an NK cell) and comprises any CDR amino acid sequence, framework region (FWR) amino acid sequence, or variable region amino acid sequence disclosed in Tables 7-10. In some embodiments, the NK cell engager is an antigen binding domain that binds to NKp30 (e.g., NKp30 present, e.g., expressed or displayed, on the surface of an NK cell) and comprises any CDR amino acid sequence, framework region (FWR) amino acid sequence, or variable region amino acid sequence disclosed in U.S. Pat. No. 6,979,546, U.S. Pat. No. 9,447,185, PCT Application No. WO2015121383A1, PCT Application No. WO2016110468A1, PCT Application No. WO2004056392A1, or U.S. Application Publication No. US20070231322A1, the sequences of which are hereby incorporated by reference. In some embodiments, binding of the NK cell engager, e.g., antigen binding domain that binds to NKp30, to the NK cell activates the NK cell. An antigen binding domain that binds to NKp30 (e.g., NKp30 present, e.g., expressed or displayed, on the surface of an NK cell) may be said to target NKp30, the NK cell, or both.

[0097] In some embodiments, the antigen binding domain that binds to NKp30 comprises one or more CDRs (e.g., VHCDR1, VHCDR2, VHCDR3, VLCDR1, VLCDR2, and/or VLCDR3) disclosed in Table 7, Table 18, or Table 8, or a sequence having at least 85%, 90%, 95%, or 99% identity thereto. In some embodiments, the antigen binding domain that binds to NKp30 comprises one or more framework regions (e.g., VHFWR1, VHFWR2, VHFWR3, VHFWR4, VLFWR1, VLFWR2, VLFWR3, and/or VLFWR4) disclosed in Table 7, Table 18, or Table 8, or a sequence having at least 85%, 90%, 95%, or 99% identity thereto. In some embodiments, the antigen binding domain that binds to NKp30 comprises a VH and/or a VL disclosed in Table 9, or a sequence having at least 85%, 90%, 95%, or 99% identity thereto. In some embodiments, any of the VH domains disclosed in Table 9 may be paired with any of the VL domains disclosed in Table 9 to form the antigen binding domain that binds to NKp30. In some embodiments, the antigen binding domain that binds to NKp30 comprises an amino acid sequence disclosed in Table 10, or a sequence having at least 85%, 90%, 95%, or 99% identity thereto.

[0098] In some embodiments, the antigen binding domain that binds to NKP30 comprises one or more CDRs (e.g., VHCDR1, VHCDR2, VHCDR3, VLCDR1, VLCDR2, and/or VLCDR3) disclosed in Table 8A and/or 8B, or a sequence having at least 85%, 90%, 95%, or 99% identity thereto. In some embodiments, the antigen binding domain that binds to NKP30 comprises one or more framework regions (e.g., VHFWR1, VHFWR2, VHFWR3, VHFWR4, VLFWR1, VLFWR2, VLFWR3, and/or VLFWR4) disclosed in Table 8A and/or 8B, or a sequence having at least 85%, 90%, 95%, or 99% identity thereto. In some embodiments, the antigen binding domain that binds to NKP30 comprises a VH and/or a VL disclosed in Table 9, or a sequence having at least 85%, 90%, 95%, or 99% identity thereto.

[0099] In some embodiments, the antigen binding domain that binds to NKp30 comprises a VH comprising a heavy chain complementarity determining region 1 (VHCDR1), a VHCDR2, and a VHCDR3, and a VL comprising a light chain complementarity determining region 1 (VLCDR1), a VLCDR2, and a VLCDR3.

[0100] In some embodiments, the VHCDR1, VHCDR2, and VHCDR3 comprise the amino acid sequences of SEQ ID NOs: 7313, 6001, and 7315, respectively (or a sequence having at least 85%, 90%, 95%, or 99% identity thereto). In some embodiments, the VHCDR1, VHCDR2, and VHCDR3 comprise the amino acid sequences of SEQ ID NOs: 7313, 6001, and 6002, respectively (or a sequence having at least 85%, 90%, 95%, or 99% identity thereto). In some embodiments, the VHCDR1, VHCDR2, and VHCDR3 comprise the amino acid sequences of SEQ ID NOs: 7313, 6008, and 6009, respectively (or a sequence having at least 85%, 90%, 95%, or 99% identity thereto). In some embodiments, the VHCDR1, VHCDR2, and VHCDR3 comprise the amino acid sequences of SEQ ID NOs: 7313, 7385, and 7315, respectively (or a sequence having at least 85%, 90%, 95%, or 99% identity thereto). In some embodiments, the VHCDR1, VHCDR2, and VHCDR3 comprise the amino acid sequences of SEQ ID NOs: 7313, 7318, and 6009, respectively (or a sequence having at least 85%, 90%, 95%, or 99% identity thereto).

[0101] In some embodiments, the VLCDR1, VLCDR2, and VLCDR3 comprise the amino acid sequences of SEQ ID NOs: 7326, 7327, and 7329, respectively (or a sequence having at least 85%, 90%, 95%, or 99% identity thereto). In some embodiments, the VLCDR1, VLCDR2, and VLCDR3 comprise the amino acid sequences of SEQ ID NOs: 6063, 6064, and 7293, respectively (or a sequence having at least 85%, 90%, 95%, or 99% identity thereto). In some embodiments, the VLCDR1, VLCDR2, and VLCDR3 comprise the amino acid sequences of SEQ ID NOs: 6070, 6071, and 6072, respectively (or a sequence having at least 85%, 90%, 95%, or 99% identity thereto). In some embodiments, the VLCDR1, VLCDR2, and VLCDR3 comprise the amino acid sequences of SEQ ID NOs: 6070, 6064, and 7321, respectively (or a sequence having at least 85%, 90%, 95%, or 99% identity thereto).

[0102] In some embodiments, the VHCDR1, VHCDR2, VHCDR3, VLCDR1, VLCDR2, and VLCDR3 comprise the amino acid sequences of SEQ ID NOs: 7313, 6001, 7315, 7326, 7327, and 7329, respectively (or a sequence having at least 85%, 90%, 95%, or 99% identity thereto). In some embodiments, the VHCDR1, VHCDR2, VHCDR3, VLCDR1, VLCDR2, and VLCDR3 comprise the amino acid sequences of SEQ ID NOs: 7313, 6001, 6002, 6063, 6064, and 7293, respectively (or a sequence having at least 85%, 90%, 95%, or 99% identity thereto). In some embodiments, the VHCDR1, VHCDR2, VHCDR3, VLCDR1, VLCDR2, and VLCDR3 comprise the amino acid sequences of SEQ ID NOs: 7313, 6008, 6009, 6070, 6071, and 6072, respectively (or a sequence having at least 85%, 90%, 95%, or 99% identity thereto). In some embodiments, the VHCDR1, VHCDR2, VHCDR3, VLCDR1, VLCDR2, and VLCDR3 comprise the amino acid sequences of SEQ ID NOs: 7313, 7385, 7315, 6070, 6064, and 7321, respectively (or a sequence having at least 85%, 90%, 95%, or 99% identity thereto). In some embodiments, the VHCDR1, VHCDR2, VHCDR3, VLCDR1, VLCDR2, and VLCDR3 comprise the amino acid sequences of SEQ ID NOs: 7313, 7318, 6009, 6070, 6064, and 7321, respectively (or a sequence having at least 85%, 90%, 95%, or 99% identity thereto).

[0103] In some embodiments, the VH comprises an amino acid sequence selected from the group consisting of SEQ ID NOs: 7298 or 7300-7304 (or a sequence having at least 85%, 90%, 95%, or 99% identity thereto) and/or the VL comprises an amino acid sequence selected from the group consisting of SEQ ID NOs: 7299 or 7305-7309 (or a sequence having at least 85%, 90%, 95%, or 99% identity thereto). In some embodiments, the VH and VL comprise the amino acid sequences of SEQ ID NOs: 7302 and 7305, respectively (or a sequence having at least 85%, 90%, 95%, or 99% identity thereto). In some embodiments, the VH and VL comprise the amino acid sequences of SEQ ID NOs: 7302 and 7309, respectively (or a sequence having at least 85%, 90%, 95%, or 99% identity thereto).

[0104] In some embodiments, the VH comprises an amino acid sequence selected from the group consisting of SEQ ID NOs: 6121 or 6123-6128 (or a sequence having at least 85%, 90%, 95%, or 99% identity thereto) and/or the VL comprises an amino acid sequence selected from the group consisting of SEQ ID NOs: 7294 or 6137-6141 (or a sequence having at least 85%, 90%, 95%, or 99% identity thereto). In some embodiments, the VH comprises an amino acid sequence selected from the group consisting of SEQ ID NOs: 6122 or 6129-6134 (or a sequence having at least 85%, 90%, 95%, or 99% identity thereto) and/or the VL comprises an amino acid sequence selected from the group consisting of SEQ ID NOs: 6136 or 6142-6147 (or a sequence having at least 85%, 90%, 95%, or 99% identity thereto). In some embodiments, the VH and VL comprise the amino acid sequences of SEQ ID NOs: 7295 and 7296, respectively (or a sequence having at least 85%, 90%, 95%, or 99% identity thereto). In some embodiments, the VH and VL comprise the amino acid sequences of SEQ ID NOs: 7297 and 7296, respectively (or a sequence having at least 85%, 90%, 95%, or 99% identity thereto). In some embodiments, the VH and VL comprise the amino acid sequences of SEQ ID NOs: 6122 and 6136, respectively (or a sequence having at least 85%, 90%, 95%, or 99% identity thereto).

[0105] In some embodiments, the antigen binding domain that binds to NKp30 comprises the amino acid sequence of SEQ ID NO: 7310 (or a sequence having at least 85%, 90%, 95%, or 99% identity thereto). In some embodiments, the antigen binding domain that binds to NKp30 comprises the amino acid sequence of SEQ ID NO: 7311 (or a sequence having at least 85%, 90%, 95%, or 99% identity thereto). In some embodiments, the antigen binding domain that binds to NKp30 comprises the amino acid sequence of SEQ ID NOs: 17, and 7386-7392 (or a sequence having at least 85%, 90%, 95%, or 99% identity thereto).

[0106] In some embodiments, the antigen binding domain that targets NKp30 comprises a VH comprising a heavy chain complementarity determining region 1 (VHCDR1) amino acid sequence of SEQ ID NO: 6000 (or a sequence with no more than 1, 2, 3, or 4 mutations, e.g., substitutions, additions, or deletions), a VHCDR2 amino acid sequence of SEQ ID NO: 6001 (or a sequence with no more than 1, 2, 3, or 4 mutations, e.g., substitutions, additions, or deletions), and/or a VHCDR3 amino acid sequence of SEQ ID NO: 6002 (or a sequence with no more than 1, 2, 3, or 4 mutations, e.g., substitutions, additions, or deletions). In some embodiments, the NKp30 antigen binding domain comprises a VH comprising a VHCDR1 amino acid sequence of SEQ ID NO: 6000, a VHCDR2 amino acid sequence of SEQ ID NO: 6001, and/or a VHCDR3 amino acid sequence of SEQ ID NO: 6002.

[0107] In some embodiments, the antigen binding domain that targets NKp30 comprises a VL comprising a light chain complementarity determining region 1 (VLCDR1) amino acid sequence of SEQ ID NO: 6063 (or a sequence with no more than 1, 2, 3, or 4 mutations, e.g., substitutions, additions, or deletions), a VLCDR2 amino acid sequence of SEQ ID NO: 6064 (or a sequence with no more than 1, 2, 3, or 4 mutations, e.g., substitutions, additions, or deletions), and/or a VLCDR3 amino acid sequence of SEQ ID NO: 7293(or a sequence with no more than 1, 2, 3, or 4 mutations, e.g., substitutions, additions, or deletions). In some embodiments, the antigen binding domain that targets NKp30 comprises a VL comprising a VLCDR1 amino acid sequence of SEQ ID NO: 6063, a VLCDR2 amino acid sequence of SEQ ID NO: 6064, and a VLCDR3 amino acid sequence of SEQ ID NO: 7293.

[0108] In some embodiments, the antigen binding domain that targets NKp30 comprises a VH comprising a heavy chain complementarity determining region 1 (VHCDR1) amino acid sequence of SEQ ID NO: 6000 (or a sequence with no more than 1, 2, 3, or 4 mutations, e.g., substitutions, additions, or deletions), a VHCDR2 amino acid sequence of SEQ ID NO: 6001 (or a sequence with no more than 1, 2, 3, or 4 mutations, e.g., substitutions, additions, or deletions), and/or a VHCDR3 amino acid sequence of SEQ ID NO: 6002 (or a sequence with no more than 1, 2, 3, or 4 mutations, e.g., substitutions, additions, or deletions), and a VL comprising a light chain complementarity determining region 1 (VLCDR1) amino acid sequence of SEQ ID NO: 6063 (or a sequence with no more than 1, 2, 3, or 4 mutations, e.g., substitutions, additions, or deletions), a VLCDR2 amino acid sequence of SEQ ID NO: 6064 (or a sequence with no more than 1, 2, 3, or 4 mutations, e.g., substitutions, additions, or deletions), and/or a VLCDR3 amino acid sequence of SEQ ID NO: 7293 (or a sequence with no more than 1, 2, 3, or 4 mutations, e.g., substitutions, additions, or deletions). In some embodiments, the NKp30 antigen binding domain comprises a VH comprising a VHCDR1 amino acid sequence of SEQ ID NO: 6000, a VHCDR2 amino acid sequence of SEQ ID NO: 6001, and/or a VHCDR3 amino acid sequence of SEQ ID NO: 6002, and a VL comprising a VLCDR1 amino acid sequence of SEQ ID NO: 6063, a VLCDR2 amino acid sequence of SEQ ID NO: 6064, and a VLCDR3 amino acid sequence of SEQ ID NO: 7293.

[0109] In some embodiments, the antigen binding domain that targets NKp30 comprises a VH comprising a heavy chain complementarity determining region 1 (VHCDR1) amino acid sequence of SEQ ID NO: 6007 (or a sequence with no more than 1, 2, 3, or 4 mutations, e.g., substitutions, additions, or deletions), a VHCDR2 amino acid sequence of SEQ ID NO: 6008 (or a sequence with no more than 1, 2, 3, or 4 mutations, e.g., substitutions, additions, or deletions), and/or a VHCDR3 amino acid sequence of SEQ ID NO: 6009 (or a sequence with no more than 1, 2, 3, or 4 mutations, e.g., substitutions, additions, or deletions). In some embodiments, the NKp30 antigen binding domain comprises a VH comprising a VHCDR1 amino acid sequence of SEQ ID NO: 6007, a VHCDR2 amino acid sequence of SEQ ID NO: 6008, and/or a VHCDR3 amino acid sequence of SEQ ID NO: 6009.

[0110] In some embodiments, the antigen binding domain that targets NKp30 comprises a VL comprising a light chain complementarity determining region 1 (VLCDR1) amino acid sequence of SEQ ID NO: 6070 (or a sequence with no more than 1, 2, 3, or 4 mutations, e.g., substitutions, additions, or deletions), a VLCDR2 amino acid sequence of SEQ ID NO: 6071 (or a sequence with no more than 1, 2, 3, or 4 mutations, e.g., substitutions, additions, or deletions), and/or a VLCDR3 amino acid sequence of SEQ ID NO: 6072 (or a sequence with no more than 1, 2, 3, or 4 mutations, e.g., substitutions, additions, or deletions). In some embodiments, the antigen binding domain that targets NKp30 comprises a VL comprising a VLCDR1 amino acid sequence of SEQ ID NO: 6070, a VLCDR2 amino acid sequence of SEQ ID NO: 6071, and a VLCDR3 amino acid sequence of SEQ ID NO: 6072.

[0111] In some embodiments, the antigen binding domain that targets NKp30 comprises a VH comprising a heavy chain complementarity determining region 1 (VHCDR1) amino acid sequence of SEQ ID NO: 6007 (or a sequence with no more than 1, 2, 3, or 4 mutations, e.g., substitutions, additions, or deletions), a VHCDR2 amino acid sequence of SEQ ID NO: 6008 (or a sequence with no more than 1, 2, 3, or 4 mutations, e.g., substitutions, additions, or deletions), and/or a VHCDR3 amino acid sequence of SEQ ID NO: 6009 (or a sequence with no more than 1, 2, 3, or 4 mutations, e.g., substitutions, additions, or deletions), and a VL comprising a light chain complementarity determining region 1 (VLCDR1) amino acid sequence of SEQ ID NO: 6070 (or a sequence with no more than 1, 2, 3, or 4 mutations, e.g., substitutions, additions, or deletions), a VLCDR2 amino acid sequence of SEQ ID NO: 6071 (or a sequence with no more than 1, 2, 3, or 4 mutations, e.g., substitutions, additions, or deletions), and/or a VLCDR3 amino acid sequence of SEQ ID NO: 6072 (or a sequence with no more than 1, 2, 3, or 4 mutations, e.g., substitutions, additions, or deletions). In some embodiments, the NKp30 antigen binding domain comprises a VH comprising a VHCDR1 amino acid sequence of SEQ ID NO: 6007, a VHCDR2 amino acid sequence of SEQ ID NO: 6008, and/or a VHCDR3 amino acid sequence of SEQ ID NO: 6009, and a VL comprising a VLCDR1 amino acid sequence of SEQ ID NO: 6070, a VLCDR2 amino acid sequence of SEQ ID NO: 6071, and a VLCDR3 amino acid sequence of SEQ ID NO: 6072.

[0112] In some embodiments, the antigen binding domain that targets NKp30 comprises a VH comprising a heavy chain framework region 1 (VHFWR1) amino acid sequence of SEQ ID NO: 6003, a VHFWR2 amino acid sequence of SEQ ID NO: 6004, a VHFWR3 amino acid sequence of SEQ ID NO: 6005, and/or a VHFWR4 amino acid sequence of SEQ ID NO: 6006.

[0113] In some embodiments, the antigen binding domain that targets NKp30 comprises a VL comprising a light chain framework region 1 (VLFWR1) amino acid sequence of SEQ ID NO: 6066, a VLFWR2 amino acid sequence of SEQ ID NO: 6067, a VLFWR3 amino acid sequence of SEQ ID NO: 7292, and/or a VLFWR4 amino acid sequence of SEQ ID NO: 6069.

[0114] In some embodiments, the antigen binding domain that targets NKp30 comprises a VH comprising a heavy chain framework region 1 (VHFWR1) amino acid sequence of SEQ ID NO: 6003, a VHFWR2 amino acid sequence of SEQ ID NO: 6004, a VHFWR3 amino acid sequence of SEQ ID NO: 6005, and/or a VHFWR4 amino acid sequence of SEQ ID NO: 6006, and a VL comprising a light chain framework region 1 (VLFWR1) amino acid sequence of SEQ ID NO: 6066, a VLFWR2 amino acid sequence of SEQ ID NO: 6067, a VLFWR3 amino acid sequence of SEQ ID NO: 7292, and/or a VLFWR4 amino acid sequence of SEQ ID NO: 6069.

[0115] In some embodiments, the antigen binding domain that targets NKp30 comprises a VH comprising a VHFWR1 amino acid sequence of SEQ ID NO: 6003 (or a sequence with no more than 1, 2, 3, 4, 5, or 6 mutations, e.g., substitutions, additions, or deletions, therefrom), a VHFWR2 amino acid sequence of SEQ ID NO: 6004 (or a sequence with no more than 1, 2, 3, 4, 5, or 6 mutations, e.g., substitutions, additions, or deletions, therefrom), a VHFWR3 amino acid sequence of SEQ ID NO: 6005 (or a sequence with no more than 1, 2, 3, 4, 5, 6, 7, 8, 9, 10, or 11 mutations, e.g., substitutions, additions, or deletions), and/or a VHFWR4 amino acid sequence of SEQ ID NO: 6006.

[0116] In some embodiments, the antigen binding domain that targets NKp30 comprises a VL comprising a VLFWR1 amino acid sequence of SEQ ID NO: 6066 (or a sequence with no more than 1, 2, or 3 mutations, e.g., substitutions, additions, or deletions), a VLFWR2 amino acid sequence of SEQ ID NO: 6067 (or a sequence with no more than 1 mutation, e.g., substitution, addition, or deletion), a VLFWR3 amino acid sequence of SEQ ID NO: 7292 (or a sequence with no more than 1 mutation, e.g., substitution, addition, or deletion), and/or a VLFWR4 amino acid sequence of SEQ ID NO: 6069.

[0117] In some embodiments, the antigen binding domain that targets NKp30 comprises a VH comprising a VHFWR1 amino acid sequence of SEQ ID NO: 6003 (or a sequence with no more than 1, 2, 3, 4, 5, or 6 mutations, e.g., substitutions, additions, or deletions, therefrom), a VHFWR2 amino acid sequence of SEQ ID NO: 6004 (or a sequence with no more than 1, 2, 3, 4, 5, or 6 mutations, e.g., substitutions, additions, or deletions, therefrom), a VHFWR3 amino acid sequence of SEQ ID NO: 6005 (or a sequence with no more than 1, 2, 3, 4, 5, 6, 7, 8, 9, 10, or 11 mutations, e.g., substitutions, additions, or deletions), and/or a VHFWR4 amino acid sequence of SEQ ID NO: 6006, and a VL comprising a VLFWR1 amino acid sequence of SEQ ID NO: 6066 (or a sequence with no more than 1, 2, or 3 mutations, e.g., substitutions, additions, or deletions), a VLFWR2 amino acid sequence of SEQ ID NO: 6067 (or a sequence with no more than 1 mutation, e.g., substitution, addition, or deletion), a VLFWR3 amino acid sequence of SEQ ID NO: 7292 (or a sequence with no more than 1 mutation, e.g., substitution, addition, or deletion), and/or a VLFWR4 amino acid sequence of SEQ ID NO: 6069.

[0118] In some embodiments, the antigen binding domain that targets NKp30 comprises a VH comprising a heavy chain framework region 1 (VHFWR1) amino acid sequence of SEQ ID NO: 6010, a VHFWR2 amino acid sequence of SEQ ID NO: 6011, a VHFWR3 amino acid sequence of SEQ ID NO: 6012, and/or a VHFWR4 amino acid sequence of SEQ ID NO: 6013.

[0119] In some embodiments, the antigen binding domain that targets NKp30 comprises a VL comprising a light chain framework region 1 (VLFWR1) amino acid sequence of SEQ ID NO: 6073, a VLFWR2 amino acid sequence of SEQ ID NO: 6074, a VLFWR3 amino acid sequence of SEQ ID NO: 6075, and/or a VLFWR4 amino acid sequence of SEQ ID NO: 6076.

[0120] In some embodiments, the antigen binding domain that targets NKp30 comprises a VH comprising a heavy chain framework region 1 (VHFWR1) amino acid sequence of SEQ ID NO: 6010, a VHFWR2 amino acid sequence of SEQ ID NO: 6011, a VHFWR3 amino acid sequence of SEQ ID NO: 6012, and/or a VHFWR4 amino acid sequence of SEQ ID NO: 6013, and a VL comprising a light chain framework region 1 (VLFWR1) amino acid sequence of SEQ ID NO: 6073, a VLFWR2 amino acid sequence of SEQ ID NO: 6074, a VLFWR3 amino acid sequence of SEQ ID NO: 6075, and/or a VLFWR4 amino acid sequence of SEQ ID NO: 6076.

[0121] In some embodiments, the antigen binding domain that targets NKp30 comprises a VH comprising a VHFWR1 amino acid sequence of SEQ ID NO: 6010 (or a sequence with no more than 1, 2, 3, 4, 5, or 6 mutations, e.g., substitutions, additions, or deletions, therefrom), a VHFWR2 amino acid sequence of SEQ ID NO: 6011 (or a sequence with no more than 1, 2, 3, 4, 5, or 6 mutations, e.g., substitutions, additions, or deletions, therefrom), a VHFWR3 amino acid sequence of SEQ ID NO: 6012 (or a sequence with no more than 1, 2, 3, 4, 5, 6, 7, 8, 9, 10, or 11 mutations, e.g., substitutions, additions, or deletions), and/or a VHFWR4 amino acid sequence of SEQ ID NO: 6013.

[0122] In some embodiments, the antigen binding domain that targets NKp30 comprises a VL comprising a VLFWR1 amino acid sequence of SEQ ID NO: 6073 (or a sequence with no more than 1, 2, or 3 mutations, e.g., substitutions, additions, or deletions), a VLFWR2 amino acid sequence of SEQ ID NO: 6074 (or a sequence with no more than 1 mutation, e.g., substitution, addition, or deletion), a VLFWR3 amino acid sequence of SEQ ID NO: 6075 (or a sequence with no more than 1 mutation, e.g., substitution, addition, or deletion), and/or a VLFWR4 amino acid sequence of SEQ ID NO: 6076.

[0123] In some embodiments, the antigen binding domain that targets NKp30 comprises a VH comprising a VHFWR1 amino acid sequence of SEQ ID NO: 6010 (or a sequence with no more than 1, 2, 3, 4, 5, or 6 mutations, e.g., substitutions, additions, or deletions, therefrom), a VHFWR2 amino acid sequence of SEQ ID NO: 6011 (or a sequence with no more than 1, 2, 3, 4, 5, or 6 mutations, e.g., substitutions, additions, or deletions, therefrom), a VHFWR3 amino acid sequence of SEQ ID NO: 6012 (or a sequence with no more than 1, 2, 3, 4, 5, 6, 7, 8, 9, 10, or 11 mutations, e.g., substitutions, additions, or deletions), and/or a VHFWR4 amino acid sequence of SEQ ID NO: 6013, and a VL comprising a VLFWR1 amino acid sequence of SEQ ID NO: 6073 (or a sequence with no more than 1, 2, or 3 mutations, e.g., substitutions, additions, or deletions), a VLFWR2 amino acid sequence of SEQ ID NO: 6074 (or a sequence with no more than 1 mutation, e.g., substitution, addition, or deletion), a VLFWR3 amino acid sequence of SEQ ID NO: 6075 (or a sequence with no more than 1 mutation, e.g., substitution, addition, or deletion), and/or a VLFWR4 amino acid sequence of SEQ ID NO: 6076.

[0124] In some embodiments, the antigen binding domain that targets NKp30 comprises a VH comprising a heavy chain framework region 1 (VHFWR1) amino acid sequence of SEQ ID NO: 6014, a VHFWR2 amino acid sequence of SEQ ID NO: 6015, a VHFWR3 amino acid sequence of SEQ ID NO: 6016, and/or a VHFWR4 amino acid sequence of SEQ ID NO: 6017.

[0125] In some embodiments, the antigen binding domain that targets NKp30 comprises a VH comprising a VHFWR1 amino acid sequence of SEQ ID NO: 6014 (or a sequence with no more than 1, 2, 3, 4, 5, or 6 mutations, e.g., substitutions, additions, or deletions, therefrom), a VHFWR2 amino acid sequence of SEQ ID NO: 6015 (or a sequence with no more than 1, 2, 3, 4, 5, or 6 mutations, e.g., substitutions, additions, or deletions, therefrom), a VHFWR3 amino acid sequence of SEQ ID NO: 6016 (or a sequence with no more than 1, 2, 3, 4, 5, 6, 7, 8, 9, 10, or 11 mutations, e.g., substitutions, additions, or deletions), and/or a VHFWR4 amino acid sequence of SEQ ID NO: 6017.

[0126] In some embodiments, the antigen binding domain that targets NKp30 comprises a VL comprising a light chain framework region 1 (VLFWR1) amino acid sequence of SEQ ID NO: 6077, a VLFWR2 amino acid sequence of SEQ ID NO: 6078, a VLFWR3 amino acid sequence of SEQ ID NO: 6079, and/or a VLFWR4 amino acid sequence of SEQ ID NO: 6080.

[0127] In some embodiments, the antigen binding domain that targets NKp30 comprises a VL comprising a VLFWR1 amino acid sequence of SEQ ID NO: 6077 (or a sequence with no more than 1, 2, or 3 mutations, e.g., substitutions, additions, or deletions), a VLFWR2 amino acid sequence of SEQ ID NO: 6078 (or a sequence with no more than 1 mutation, e.g., substitution, addition, or deletion), a VLFWR3 amino acid sequence of SEQ ID NO: 6079 (or a sequence with no more than 1 mutation, e.g., substitution, addition, or deletion), and/or a VLFWR4 amino acid sequence of SEQ ID NO: 6080.

[0128] In some embodiments, the antigen binding domain that targets NKp30 comprises a VH comprising a heavy chain framework region 1 (VHFWR1) amino acid sequence of SEQ ID NO: 6018, a VHFWR2 amino acid sequence of SEQ ID NO: 6019, a VHFWR3 amino acid sequence of SEQ ID NO: 6020, and/or a VHFWR4 amino acid sequence of SEQ ID NO: 6021.

[0129] In some embodiments, the antigen binding domain that targets NKp30 comprises a VH comprising a VHFWR1 amino acid sequence of SEQ ID NO: 6018 (or a sequence with no more than 1, 2, 3, 4, 5, or 6 mutations, e.g., substitutions, additions, or deletions, therefrom), a VHFWR2 amino acid sequence of SEQ ID NO: 6019 (or a sequence with no more than 1, 2, 3, 4, 5, or 6 mutations, e.g., substitutions, additions, or deletions, therefrom), a VHFWR3 amino acid sequence of SEQ ID NO: 6020 (or a sequence with no more than 1, 2, 3, 4, 5, 6, 7, 8, 9, 10, or 11 mutations, e.g., substitutions, additions, or deletions), and/or a VHFWR4 amino acid sequence of SEQ ID NO: 6021.

[0130] In some embodiments, the antigen binding domain that targets NKp30 comprises a VL comprising a light chain framework region 1 (VLFWR1) amino acid sequence of SEQ ID NO: 6081, a VLFWR2 amino acid sequence of SEQ ID NO: 6082, a VLFWR3 amino acid sequence of SEQ ID NO: 6083, and/or a VLFWR4 amino acid sequence of SEQ ID NO: 6084.

[0131] In some embodiments, the antigen binding domain that targets NKp30 comprises a VL comprising a VLFWR1 amino acid sequence of SEQ ID NO: 6081 (or a sequence with no more than 1, 2, or 3 mutations, e.g., substitutions, additions, or deletions), a VLFWR2 amino acid sequence of SEQ ID NO: 6082 (or a sequence with no more than 1 mutation, e.g., substitution, addition, or deletion), a VLFWR3 amino acid sequence of SEQ ID NO: 6083 (or a sequence with no more than 1 mutation, e.g., substitution, addition, or deletion), and/or a VLFWR4 amino acid sequence of SEQ ID NO: 6084.

[0132] In some embodiments, the antigen binding domain that targets NKp30 comprises a VH comprising a heavy chain framework region 1 (VHFWR1) amino acid sequence of SEQ ID NO: 6022, a VHFWR2 amino acid sequence of SEQ ID NO: 6023, a VHFWR3 amino acid sequence of SEQ ID NO: 6024, and/or a VHFWR4 amino acid sequence of SEQ ID NO: 6025.

[0133] In some embodiments, the antigen binding domain that targets NKp30 comprises a VH comprising a VHFWR1 amino acid sequence of SEQ ID NO: 6022 (or a sequence with no more than 1, 2, 3, 4, 5, or 6 mutations, e.g., substitutions, additions, or deletions, therefrom), a VHFWR2 amino acid sequence of SEQ ID NO: 6023 (or a sequence with no more than 1, 2, 3, 4, 5, or 6 mutations, e.g., substitutions, additions, or deletions, therefrom), a VHFWR3 amino acid sequence of SEQ ID NO: 6024 (or a sequence with no more than 1, 2, 3, 4, 5, 6, 7, 8, 9, 10, or 11 mutations, e.g., substitutions, additions, or deletions), and/or a VHFWR4 amino acid sequence of SEQ ID NO: 6025.

[0134] In some embodiments, the antigen binding domain that targets NKp30 comprises a VL comprising a light chain framework region 1 (VLFWR1) amino acid sequence of SEQ ID NO: 6085, a VLFWR2 amino acid sequence of SEQ ID NO: 6086, a VLFWR3 amino acid sequence of SEQ ID NO: 6087, and/or a VLFWR4 amino acid sequence of SEQ ID NO: 6088.

[0135] In some embodiments, the antigen binding domain that targets NKp30 comprises a VL comprising a VLFWR1 amino acid sequence of SEQ ID NO: 6085 (or a sequence with no more than 1, 2, or 3 mutations, e.g., substitutions, additions, or deletions), a VLFWR2 amino acid sequence of SEQ ID NO: 6086 (or a sequence with no more than 1 mutation, e.g., substitution, addition, or deletion), a VLFWR3 amino acid sequence of SEQ ID NO: 6087 (or a sequence with no more than 1 mutation, e.g., substitution, addition, or deletion), and/or a VLFWR4 amino acid sequence of SEQ ID NO: 6088.

[0136] In some embodiments, the antigen binding domain that targets NKp30 comprises a VH comprising a heavy chain framework region 1 (VHFWR1) amino acid sequence of SEQ ID NO: 6026, a VHFWR2 amino acid sequence of SEQ ID NO: 6027, a VHFWR3 amino acid sequence of SEQ ID NO: 6028, and/or a VHFWR4 amino acid sequence of SEQ ID NO: 6029.

[0137] In some embodiments, the antigen binding domain that targets NKp30 comprises a VH comprising a VHFWR1 amino acid sequence of SEQ ID NO: 6026 (or a sequence with no more than 1, 2, 3, 4, 5, or 6 mutations, e.g., substitutions, additions, or deletions, therefrom), a VHFWR2 amino acid sequence of SEQ ID NO: 6027 (or a sequence with no more than 1, 2, 3, 4, 5, or 6 mutations, e.g., substitutions, additions, or deletions, therefrom), a VHFWR3 amino acid sequence of SEQ ID NO: 6028 (or a sequence with no more than 1, 2, 3, 4, 5, 6, 7, 8, 9, 10, or 11 mutations, e.g., substitutions, additions, or deletions), and/or a VHFWR4 amino acid sequence of SEQ ID NO: 6029.

[0138] In some embodiments, the antigen binding domain that targets NKp30 comprises a VL comprising a light chain framework region 1 (VLFWR1) amino acid sequence of SEQ ID NO: 6089, a VLFWR2 amino acid sequence of SEQ ID NO: 6090, a VLFWR3 amino acid sequence of SEQ ID NO: 6091, and/or a VLFWR4 amino acid sequence of SEQ ID NO: 6092.

[0139] In some embodiments, the antigen binding domain that targets NKp30 comprises a VL comprising a VLFWR1 amino acid sequence of SEQ ID NO: 6089 (or a sequence with no more than 1, 2, or 3 mutations, e.g., substitutions, additions, or deletions), a VLFWR2 amino acid sequence of SEQ ID NO: 6090 (or a sequence with no more than 1 mutation, e.g., substitution, addition, or deletion), a VLFWR3 amino acid sequence of SEQ ID NO: 6091 (or a sequence with no more than 1 mutation, e.g., substitution, addition, or deletion), and/or a VLFWR4 amino acid sequence of SEQ ID NO: 6092.

[0140] In some embodiments, the antigen binding domain that targets NKp30 comprises a VH comprising a heavy chain framework region 1 (VHFWR1) amino acid sequence of SEQ ID NO: 6030, a VHFWR2 amino acid sequence of SEQ ID NO: 6032, a VHFWR3 amino acid sequence of SEQ ID NO: 6033, and/or a VHFWR4 amino acid sequence of SEQ ID NO: 6034.

[0141] In some embodiments, the antigen binding domain that targets NKp30 comprises a VH comprising a VHFWR1 amino acid sequence of SEQ ID NO: 6030 (or a sequence with no more than 1, 2, 3, 4, 5, or 6 mutations, e.g., substitutions, additions, or deletions, therefrom), a VHFWR2 amino acid sequence of SEQ ID NO: 6032 (or a sequence with no more than 1, 2, 3, 4, 5, or 6 mutations, e.g., substitutions, additions, or deletions, therefrom), a VHFWR3 amino acid sequence of SEQ ID NO: 6033 (or a sequence with no more than 1, 2, 3, 4, 5, 6, 7, 8, 9, 10, or 11 mutations, e.g., substitutions, additions, or deletions), and/or a VHFWR4 amino acid sequence of SEQ ID NO: 6034.

[0142] In some embodiments, the antigen binding domain that targets NKp30 comprises a VL comprising a light chain framework region 1 (VLFWR1) amino acid sequence of SEQ ID NO: 6093, a VLFWR2 amino acid sequence of SEQ ID NO: 6094, a VLFWR3 amino acid sequence of SEQ ID NO: 6095, and/or a VLFWR4 amino acid sequence of SEQ ID NO: 6096.

[0143] In some embodiments, the antigen binding domain that targets NKp30 comprises a VL comprising a VLFWR1 amino acid sequence of SEQ ID NO: 6093 (or a sequence with no more than 1, 2, or 3 mutations, e.g., substitutions, additions, or deletions), a VLFWR2 amino acid sequence of SEQ ID NO: 6094 (or a sequence with no more than 1 mutation, e.g., substitution, addition, or deletion), a VLFWR3 amino acid sequence of SEQ ID NO: 6095 (or a sequence with no more than 1 mutation, e.g., substitution, addition, or deletion), and/or a VLFWR4 amino acid sequence of SEQ ID NO: 6096.

[0144] In some embodiments, the antigen binding domain that targets NKp30 comprises a VH comprising a heavy chain framework region 1 (VHFWR1) amino acid sequence of SEQ ID NO: 6035, a VHFWR2 amino acid sequence of SEQ ID NO: 6036, a VHFWR3 amino acid sequence of SEQ ID NO: 6037, and/or a VHFWR4 amino acid sequence of SEQ ID NO: 6038.

[0145] In some embodiments, the antigen binding domain that targets NKp30 comprises a VH comprising a VHFWR1 amino acid sequence of SEQ ID NO: 6035 (or a sequence with no more than 1, 2, 3, 4, 5, or 6 mutations, e.g., substitutions, additions, or deletions, therefrom), a VHFWR2 amino acid sequence of SEQ ID NO: 6036 (or a sequence with no more than 1, 2, 3, 4, 5, or 6 mutations, e.g., substitutions, additions, or deletions, therefrom), a VHFWR3 amino acid sequence of SEQ ID NO: 6037 (or a sequence with no more than 1, 2, 3, 4, 5, 6, 7, 8, 9, 10, or 11 mutations, e.g., substitutions, additions, or deletions), and/or a VHFWR4 amino acid sequence of SEQ ID NO: 6038.

[0146] In some embodiments, the antigen binding domain that targets NKp30 comprises a VH comprising a heavy chain framework region 1 (VHFWR1) amino acid sequence of SEQ ID NO: 6039, a VHFWR2 amino acid sequence of SEQ ID NO: 6040, a VHFWR3 amino acid sequence of SEQ ID NO: 6041, and/or a VHFWR4 amino acid sequence of SEQ ID NO: 6042.

[0147] In some embodiments, the antigen binding domain that targets NKp30 comprises a VH comprising a VHFWR1 amino acid sequence of SEQ ID NO: 6039 (or a sequence with no more than 1, 2, 3, 4, 5, or 6 mutations, e.g., substitutions, additions, or deletions, therefrom), a VHFWR2 amino acid sequence of SEQ ID NO: 6040 (or a sequence with no more than 1, 2, 3, 4, 5, or 6 mutations, e.g., substitutions, additions, or deletions, therefrom), a VHFWR3 amino acid sequence of SEQ ID NO: 6041 (or a sequence with no more than 1, 2, 3, 4, 5, 6, 7, 8, 9, 10, or 11 mutations, e.g., substitutions, additions, or deletions), and/or a VHFWR4 amino acid sequence of SEQ ID NO: 6042.

[0148] In some embodiments, the antigen binding domain that targets NKp30 comprises a VL comprising a light chain framework region 1 (VLFWR1) amino acid sequence of SEQ ID NO: 6097, a VLFWR2 amino acid sequence of SEQ ID NO: 6098, a VLFWR3 amino acid sequence of SEQ ID NO: 6099, and/or a VLFWR4 amino acid sequence of SEQ ID NO: 6100.

[0149] In some embodiments, the antigen binding domain that targets NKp30 comprises a VL comprising a VLFWR1 amino acid sequence of SEQ ID NO: 6097 (or a sequence with no more than 1, 2, or 3 mutations, e.g., substitutions, additions, or deletions), a VLFWR2 amino acid sequence of SEQ ID NO: 6098 (or a sequence with no more than 1 mutation, e.g., substitution, addition, or deletion), a VLFWR3 amino acid sequence of SEQ ID NO: 6099 (or a sequence with no more than 1 mutation, e.g., substitution, addition, or deletion), and/or a VLFWR4 amino acid sequence of SEQ ID NO: 6100.

[0150] In some embodiments, the antigen binding domain that targets NKp30 comprises a VH comprising a heavy chain framework region 1 (VHFWR1) amino acid sequence of SEQ ID NO: 6043, a VHFWR2 amino acid sequence of SEQ ID NO: 6044, a VHFWR3 amino acid sequence of SEQ ID NO: 6045, and/or a VHFWR4 amino acid sequence of SEQ ID NO: 6046.

[0151] In some embodiments, the antigen binding domain that targets NKp30 comprises a VH comprising a VHFWR1 amino acid sequence of SEQ ID NO: 6043 (or a sequence with no more than 1, 2, 3, 4, 5, or 6 mutations, e.g., substitutions, additions, or deletions, therefrom), a VHFWR2 amino acid sequence of SEQ ID NO: 6044 (or a sequence with no more than 1, 2, 3, 4, 5, or 6 mutations, e.g., substitutions, additions, or deletions, therefrom), a VHFWR3 amino acid sequence of SEQ ID NO: 6045 (or a sequence with no more than 1, 2, 3, 4, 5, 6, 7, 8, 9, 10, or 11 mutations, e.g., substitutions, additions, or deletions), and/or a VHFWR4 amino acid sequence of SEQ ID NO: 6046.

[0152] In some embodiments, the antigen binding domain that targets NKp30 comprises a VL comprising a light chain framework region 1 (VLFWR1) amino acid sequence of SEQ ID NO: 6101, a VLFWR2 amino acid sequence of SEQ ID NO: 6102, a VLFWR3 amino acid sequence of SEQ ID NO: 6103, and/or a VLFWR4 amino acid sequence of SEQ ID NO: 6104.

[0153] In some embodiments, the antigen binding domain that targets NKp30 comprises a VL comprising a VLFWR1 amino acid sequence of SEQ ID NO: 6101 (or a sequence with no more than 1, 2, or 3 mutations, e.g., substitutions, additions, or deletions), a VLFWR2 amino acid sequence of SEQ ID NO: 6102 (or a sequence with no more than 1 mutation, e.g., substitution, addition, or deletion), a VLFWR3 amino acid sequence of SEQ ID NO: 6103 (or a sequence with no more than 1 mutation, e.g., substitution, addition, or deletion), and/or a VLFWR4 amino acid sequence of SEQ ID NO: 6104.

[0154] In some embodiments, the antigen binding domain that targets NKp30 comprises a VH comprising a heavy chain framework region 1 (VHFWR1) amino acid sequence of SEQ ID NO: 6047, a VHFWR2 amino acid sequence of SEQ ID NO: 6048, a VHFWR3 amino acid sequence of SEQ ID NO: 6049, and/or a VHFWR4 amino acid sequence of SEQ ID NO: 6050.

[0155] In some embodiments, the antigen binding domain that targets NKp30 comprises a VH comprising a VHFWR1 amino acid sequence of SEQ ID NO: 6047 (or a sequence with no more than 1, 2, 3, 4, 5, or 6 mutations, e.g., substitutions, additions, or deletions, therefrom), a VHFWR2 amino acid sequence of SEQ ID NO: 6048 (or a sequence with no more than 1, 2, 3, 4, 5, or 6 mutations, e.g., substitutions, additions, or deletions, therefrom), a VHFWR3 amino acid sequence of SEQ ID NO: 6049 (or a sequence with no more than 1, 2, 3, 4, 5, 6, 7, 8, 9, 10, or 11 mutations, e.g., substitutions, additions, or deletions), and/or a VHFWR4 amino acid sequence of SEQ ID NO: 6050.

[0156] In some embodiments, the antigen binding domain that targets NKp30 comprises a VL comprising a light chain framework region 1 (VLFWR1) amino acid sequence of SEQ ID NO: 6105, a VLFWR2 amino acid sequence of SEQ ID NO: 6106, a VLFWR3 amino acid sequence of SEQ ID NO: 6107, and/or a VLFWR4 amino acid sequence of SEQ ID NO: 6108.

[0157] In some embodiments, the antigen binding domain that targets NKp30 comprises a VL comprising a VLFWR1 amino acid sequence of SEQ ID NO: 6105 (or a sequence with no more than 1, 2, or 3 mutations, e.g., substitutions, additions, or deletions), a VLFWR2 amino acid sequence of SEQ ID NO: 6106 (or a sequence with no more than 1 mutation, e.g., substitution, addition, or deletion), a VLFWR3 amino acid sequence of SEQ ID NO: 6107 (or a sequence with no more than 1 mutation, e.g., substitution, addition, or deletion), and/or a VLFWR4 amino acid sequence of SEQ ID NO: 6108.

[0158] In some embodiments, the antigen binding domain that targets NKp30 comprises a VH comprising a heavy chain framework region 1 (VHFWR1) amino acid sequence of SEQ ID NO: 6051, a VHFWR2 amino acid sequence of SEQ ID NO: 6052, a VHFWR3 amino acid sequence of SEQ ID NO: 6053, and/or a VHFWR4 amino acid sequence of SEQ ID NO: 6054.

[0159] In some embodiments, the antigen binding domain that targets NKp30 comprises a VH comprising a VHFWR1 amino acid sequence of SEQ ID NO: 6051 (or a sequence with no more than 1, 2, 3, 4, 5, or 6 mutations, e.g., substitutions, additions, or deletions, therefrom), a VHFWR2 amino acid sequence of SEQ ID NO: 6052 (or a sequence with no more than 1, 2, 3, 4, 5, or 6 mutations, e.g., substitutions, additions, or deletions, therefrom), a VHFWR3 amino acid sequence of SEQ ID NO: 6053 (or a sequence with no more than 1, 2, 3, 4, 5, 6, 7, 8, 9, 10, or 11 mutations, e.g., substitutions, additions, or deletions), and/or a VHFWR4 amino acid sequence of SEQ ID NO: 6054.

[0160] In some embodiments, the antigen binding domain that targets NKp30 comprises a VL comprising a light chain framework region 1 (VLFWR1) amino acid sequence of SEQ ID NO: 6109, a VLFWR2 amino acid sequence of SEQ ID NO: 6110, a VLFWR3 amino acid sequence of SEQ ID NO: 6111, and/or a VLFWR4 amino acid sequence of SEQ ID NO: 6112.

[0161] In some embodiments, the antigen binding domain that targets NKp30 comprises a VL comprising a VLFWR1 amino acid sequence of SEQ ID NO: 6109 (or a sequence with no more than 1, 2, or 3 mutations, e.g., substitutions, additions, or deletions), a VLFWR2 amino acid sequence of SEQ ID NO: 6110 (or a sequence with no more than 1 mutation, e.g., substitution, addition, or deletion), a VLFWR3 amino acid sequence of SEQ ID NO: 6111 (or a sequence with no more than 1 mutation, e.g., substitution, addition, or deletion), and/or a VLFWR4 amino acid sequence of SEQ ID NO: 6112.

[0162] In some embodiments, the antigen binding domain that targets NKp30 comprises a VH comprising a heavy chain framework region 1 (VHFWR1) amino acid sequence of SEQ ID NO: 6055, a VHFWR2 amino acid sequence of SEQ ID NO: 6056, a VHFWR3 amino acid sequence of SEQ ID NO: 6057, and/or a VHFWR4 amino acid sequence of SEQ ID NO: 6058.

[0163] In some embodiments, the antigen binding domain that targets NKp30 comprises a VH comprising a VHFWR1 amino acid sequence of SEQ ID NO: 6055 (or a sequence with no more than 1, 2, 3, 4, 5, or 6 mutations, e.g., substitutions, additions, or deletions, therefrom), a VHFWR2 amino acid sequence of SEQ ID NO: 6056 (or a sequence with no more than 1, 2, 3, 4, 5, or 6 mutations, e.g., substitutions, additions, or deletions, therefrom), a VHFWR3 amino acid sequence of SEQ ID NO: 6057 (or a sequence with no more than 1, 2, 3, 4, 5, 6, 7, 8, 9, 10, or 11 mutations, e.g., substitutions, additions, or deletions), and/or a VHFWR4 amino acid sequence of SEQ ID NO: 6058.

[0164] In some embodiments, the antigen binding domain that targets NKp30 comprises a VL comprising a light chain framework region 1 (VLFWR1) amino acid sequence of SEQ ID NO: 6113, a VLFWR2 amino acid sequence of SEQ ID NO: 6114, a VLFWR3 amino acid sequence of SEQ ID NO: 6115, and/or a VLFWR4 amino acid sequence of SEQ ID NO: 6116.

[0165] In some embodiments, the antigen binding domain that targets NKp30 comprises a VL comprising a VLFWR1 amino acid sequence of SEQ ID NO: 6113 (or a sequence with no more than 1, 2, or 3 mutations, e.g., substitutions, additions, or deletions), a VLFWR2 amino acid sequence of SEQ ID NO: 6114 (or a sequence with no more than 1 mutation, e.g., substitution, addition, or deletion), a VLFWR3 amino acid sequence of SEQ ID NO: 6115 (or a sequence with no more than 1 mutation, e.g., substitution, addition, or deletion), and/or a VLFWR4 amino acid sequence of SEQ ID NO: 6116.

[0166] In some embodiments, the antigen binding domain that targets NKp30 comprises a VH comprising a heavy chain framework region 1 (VHFWR1) amino acid sequence of SEQ ID NO: 6059, a VHFWR2 amino acid sequence of SEQ ID NO: 6060, a VHFWR3 amino acid sequence of SEQ ID NO: 6061, and/or a VHFWR4 amino acid sequence of SEQ ID NO: 6062.

[0167] In some embodiments, the antigen binding domain that targets NKp30 comprises a VH comprising a VHFWR1 amino acid sequence of SEQ ID NO: 6059 (or a sequence with no more than 1, 2, 3, 4, 5, or 6 mutations, e.g., substitutions, additions, or deletions, therefrom), a VHFWR2 amino acid sequence of SEQ ID NO: 6060 (or a sequence with no more than 1, 2, 3, 4, 5, or 6 mutations, e.g., substitutions, additions, or deletions, therefrom), a VHFWR3 amino acid sequence of SEQ ID NO: 6061 (or a sequence with no more than 1, 2, 3, 4, 5, 6, 7, 8, 9, 10, or 11 mutations, e.g., substitutions, additions, or deletions), and/or a VHFWR4 amino acid sequence of SEQ ID NO: 6062.

[0168] In some embodiments, the antigen binding domain that targets NKp30 comprises a VL comprising a light chain framework region 1 (VLFWR1) amino acid sequence of SEQ ID NO: 6117, a VLFWR2 amino acid sequence of SEQ ID NO: 6118, a VLFWR3 amino acid sequence of SEQ ID NO: 6119, and/or a VLFWR4 amino acid sequence of SEQ ID NO: 6120.

[0169] In some embodiments, the antigen binding domain that targets NKp30 comprises a VL comprising a VLFWR1 amino acid sequence of SEQ ID NO: 6117 (or a sequence with no more than 1, 2, or 3 mutations, e.g., substitutions, additions, or deletions), a VLFWR2 amino acid sequence of SEQ ID NO: 6118 (or a sequence with no more than 1 mutation, e.g., substitution, addition, or deletion), a VLFWR3 amino acid sequence of SEQ ID NO: 6119 (or a sequence with no more than 1 mutation, e.g., substitution, addition, or deletion), and/or a VLFWR4 amino acid sequence of SEQ ID NO: 6120.

[0170] In some embodiments, the antigen binding domain that targets NKp30 comprises a VH comprising the amino acid sequence of SEQ ID NO: 6148 (or an amino acid sequence having at least about 77%, 80%, 85%, 90%, 95%, or 99% sequence identity to SEQ ID NO: 6148). In some embodiments, the antigen binding domain that targets NKp30 comprises a VH comprising the amino acid sequence of SEQ ID NO: 6149 (or an amino acid sequence having at least about 77%, 80%, 85%, 90%, 95%, or 99% sequence identity to SEQ ID NO: 6149). In some embodiments, the antigen binding domain that targets NKp30 comprises a VL comprising the amino acid sequence of SEQ ID NO: 6150 (or an amino acid sequence having at least about 93%, 95%, or 99% sequence identity to SEQ ID NO: 6150). In some embodiments, antigen binding domain that targets NKp30 comprises a VH comprising the amino acid sequence of SEQ ID NO: 6148. In some embodiments, antigen binding domain that targets NKp30 comprises a VH comprising the amino acid sequence of SEQ ID NO: 6149. In some embodiments, the antigen binding domain that targets NKp30 comprises a VL comprising the amino acid sequence of SEQ ID NO: 6150.

[0171] In some embodiments, the antigen binding domain that targets NKp30 comprises a VH comprising the amino acid sequence of SEQ ID NO: 6148, and a VL comprising the amino acid sequence of SEQ ID NO: 6150. In some embodiments, the antigen binding domain that targets NKp30 comprises a VH comprising the amino acid sequence of SEQ ID NO: 6149, and a VL comprising the amino acid sequence of SEQ ID NO: 6150.

[0172] In some embodiments, the antigen binding domain that targets NKp30 comprises a VH comprising the amino acid sequence of SEQ ID NO: 6151 (or an amino acid sequence having at least about 77%, 80%, 85%, 90%, 95%, or 99% sequence identity to SEQ ID NO: 6151). In some embodiments, the antigen binding domain that targets NKp30 comprises a VH comprising the amino acid sequence of SEQ ID NO: 6152 (or an amino acid sequence having at least about 77%, 80%, 85%, 90%, 95%, or 99% sequence identity to SEQ ID NO: 6152). In some embodiments, the antigen binding domain that targets NKp30 comprises a VL comprising the amino acid sequence of SEQ ID NO: 6153 (or an amino acid sequence having at least about 93%, 95%, or 99% sequence identity to SEQ ID NO: 6153). In some embodiments, antigen binding domain that targets NKp30 comprises a VH comprising the amino acid sequence of SEQ ID NO: 6151. In some embodiments, antigen binding domain that targets NKp30 comprises a VH comprising the amino acid sequence of SEQ ID NO: 6152. In some embodiments, the antigen binding domain that targets NKp30 comprises a VL comprising the amino acid sequence of SEQ ID NO: 6153.

[0173] In some embodiments, the antigen binding domain that targets NKp30 comprises a VH comprising the amino acid sequence of SEQ ID NO: 6151, and a VL comprising the amino acid sequence of SEQ ID NO: 6153. In some embodiments, the antigen binding domain that targets NKp30 comprises a VH comprising the amino acid sequence of SEQ ID NO: 6152, and a VL comprising the amino acid sequence of SEQ ID NO: 6153.

[0174] In some embodiments, the antigen binding domain that targets NKp30 comprises an scFv. In some embodiments, the scFv comprises an amino acid sequence selected from SEQ ID NOs: 17, and 7386-7392, or an amino acid sequence having at least about 93%, 95%, or 99% sequence identity thereto.

TABLE 7

Exemplary heavy chain CDRs and FWRs of NKp30-targeting antigen binding domains

| | | | | | | | |
|---|---|---|---|---|---|---|---|
| Ab ID | VHFWR1 | VHCDR1 | VHFWR2 | VHCDR2 | VHFWR3 | VHCDR3 | VHFWR4 |
| 9G1-HC | QIQLQES GPGLVK PSQSLSL TCSVTGF SIN (SEQ ID NO: 6003) | TGGYHW N (SEQ ID NO: 6000) | WIRQFP GKKLEW MG (SEQ ID NO: 6004) | YIYSSGS TSYNPSL KS (SEQ ID NO: 6001) | RISITRD TSKNQFF LQLNSV TTEDTA TYYCAR (SEQ ID NO: 6005) | GNWHYF DF (SEQ ID NO: 6002) | WGQGT MVTVSS (SEQ ID NO: 6006) |
| 15H6-HC | QIQLQES GPGLVK PSQSLSL TCSVTGF SIN (SEQ ID NO: 6010) | TGGYHW N (SEQ ID NO: 6007) | WIRQFP GKKLEW MG (SEQ ID NO: 6011) | YIYSSGT TRYNPSL KS (SEQ ID NO: 6008) | RISITRD TSKNQFF LQLNSV TPEDTAT YYCTR (SEQ ID NO: 6012) | GNWHYF DY (SEQ ID NO: 6009) | WGQGTL VAVSS (SEQ ID NO: 6013) |
| 9G1-HC_1 | QIQLQES GPGLVK PSETLSL TCTVSGF SIN (SEQ ID NO: 6014) | TGGYHW N (SEQ ID NO: 6000) | WIRQPA GKGLEW IG (SEQ ID NO: 6015) | YIYSSGS TSYNPSL KS (SEQ ID NO: 6001) | RVTMSR DTSKNQ FSLKLSS VTAADT AVYYCA R (SEQ ID NO: 6016) | GNWHYF DF (SEQ ID NO: 6002) | WGQGT MVTVSS (SEQ ID NO: 6017) |
| 9G1-HC_2 | QIQLQES GPGLVK PSQTLSL TCTVSGF SIN (SEQ ID NO: 6018) | TGGYHW N (SEQ ID NO: 6000) | WIRQHP GKGLEW IG (SEQ ID NO: 6019) | YIYSSGS TSYNPSL KS (SEQ ID NO: 6001) | LVTISRD TSKNQFS LKLSSVT AADTAV YYCAR (SEQ ID NO: 6020) | GNWHYF DF (SEQ ID NO: 6002) | WGQGT MVTVSS (SEQ ID NO: 6021) |
| 9G1-HC_3 | EIQLLES GGGLVQ PGGSLRL SCAVSG FSIN (SEQ ID NO: 6022) | TGGYHW N (SEQ ID NO: 6000) | WVRQAP GKGLEW VG (SEQ ID NO: 6023) | YIYSSGS TSYNPSL KS (SEQ ID NO: 6001) | RFTISRD TSKNTF YLQMNS LRAEDT AVYYCA R (SEQ ID NO: 6024) | GNWHYF DF (SEQ ID NO: 6002) | WGQGT MVTVSS (SEQ ID NO: 6025) |
| 9G1-HC_4 | QIQLVQS GAEVKK PGSSVK VSCKVS GFSIN (SEQ ID NO: 6026) | TGGYHW N (SEQ ID NO: 6000) | WVRQAP GQGLEW MG (SEQ ID NO: 6027) | YIYSSGS TSYNPSL KS (SEQ ID NO: 6001) | RVTITRD TSTNTFY MELSSL RSEDTA VYYCAR (SEQ ID NO: 6028) | GNWHYF DF (SEQ ID NO: 6002) | WGQGT MVTVSS (SEQ ID NO: 6029) |
| 9G1-HC_5 | EIQLVES GGGLVQ PGGSLRL SCAVSG FSIN (SEQ ID NO: 6030) | TGGYHW N (SEQ ID NO: 6000) | WVRQAP GKGLEW VG (SEQ ID NOL 6032) | YIYSSGS TSYNPSL KS (SEQ ID NO: 6001) | RFTISRD TAKNSF YLQMNS LRAEDT AVYYCA R (SEQ ID NO: 6033) | GNWHYF DF (SEQ ID NO: 6002) | WGQGT MVTVSS (SEQ ID NO: 6034) |
| 9G1-HC_6 | QIQLVQS GAEVKK PGASVK VSCKVS GFSIN (SEQ ID NO: 6035) | TGGYHW N (SEQ ID NO: 6000) | WVRQAP GQGLEW MG (SEQ ID NO: 6036) | YIYSSGS TSYNPSL KS (SEQ ID NO: 6001) | RVTMTR DTSTNTF YMELSS LRSEDT AVYYCA R (SEQ ID NO: 6037) | GNWHYF DF (SEQ ID NO: 6002) | WGQGT MVTVSS (SEQ ID NO: 6038) |
| 15H6-HC_1 | QIQLQES GPGLVK PSQTLSL TCTVSGF | TGGYHW N (SEQ ID NO: 6007) | WIRQHP GKGLEW IG (SEQ | YIYSSGT TRYNPSL KS (SEQ | LVTISRD TSKNQFS LKLSSVT AADTAV | GNWHYF DY (SEQ ID NO: 6009) | WGQGTL VTVSS (SEQ ID NO: 6042) |
| | SIN (SEQ ID NO: 6039) | | ID NO: 6040) | ID NO: 6008) | YYCAR (SEQ ID NO: 6041) | | |
| 15H6-HC_2 | QIQLQES GPGLVK PSETLSL TCTVSGF SIN (SEQ ID NO: 6043) | TGGYHW N (SEQ ID NO: 6007) | WIRQPA GKGLEW IG (SEQ ID NO: 6044) | YIYSSGT TRYNPSL KS (SEQ ID NO: 6008) | RVTMSR DTSKNQ FSLKLSS VTAADT AVYYCA R (SEQ ID NO: 6045) | GNWHYF DY (SEQ ID NO: 6009) | WGQGTL VTVSS (SEQ ID NO: 6046) |
| 15H6-HC_3 | EIQLLES GGGLVQ PGGSLRL SCAVSG FSIN (SEQ ID NO: 6047) | TGGYHW N (SEQ ID NO: 6007) | WVRQAP GKGLEW VG (SEQ ID NO: 6048) | YIYSSGT TRYNPSL KS (SEQ ID NO: 6008) | RFTISRD TSKNTF YLQMNS LRAEDT AVYYCA R (SEQ ID NO: 6049) | GNWHYF DY (SEQ ID NO: 6009) | WGQGTL VTVSS (SEQ ID NO: 6050) |
| 15H6-HC_4 | QIQLVES GGGLVK PGGSLRL SCAVSG FSIN (SEQ ID NO: 6051) | TGGYHW N (SEQ ID NO: 6007) | WIRQAP GKGLEW VG (SEQ ID NO: 6052) | YIYSSGT TRYNPSL KS (SEQ ID NO: 6008) | RFTISRD TAKNSF YLQMNS LRAEDT AVYYCA R (SEQ ID NO: 6053) | GNWHYF DY (SEQ ID NO: 6009) | WGQGTL VTVSS (SEQ ID NO: 6054) |
| 15H6-HC_5 | QIQLVQS GAEVKK PGASVK VSCKVS GFSIN (SEQ ID NO: 6055) | TGGYHW N (SEQ ID NO: 6007) | WVRQAP GQGLEW MG (SEQ ID NO: 6056) | YIYSSGT TRYNPSL KS (SEQ ID NO: 6008) | RVTMTR DTSTNTF YMELSS LRSEDT AVYYCA R (SEQ ID NO: 6057) | GNWHYF DY (SEQ ID NO: 6009) | WGQGTL VTVSS (SEQ ID NO: 6058) |
| 15H6-HC_6 | EIQLVQS GAEVKK PGATVKI SCKVSG FSIN (SEQ ID NO: 6059) | TGGYHW N (SEQ ID NO: 6007) | WVQQAP GKGLEW MG (SEQ ID NO: 6060) | YIYSSGT TRYNPSL KS (SEQ ID NO: 6008) | RVTITRD TSTNTFY MELSSL RSEDTA VYYCAR (SEQ ID NO: 6061) | GNWHYF DY (SEQ ID NO: 6009) | WGQGTL VTVSS (SEQ ID NO: 6062) |

TABLE 18

Exemplary heavy chain CDRs and FWRs of NKp30-targeting antigen binding domains (according to the Kabat numbering scheme)

| | | | | | | | |
|---|---|---|---|---|---|---|---|
| Ab ID | VHFWR1 | VHCDR1 | VHFWR2 | VHCDR2 | VHFWR3 | VHCDR3 | VHFWR4 |
| 9G1-HC | QIQLQES GPGLVK PSQSLSL TCSVTGF SINTG (SEQ ID NO: 7317) | GYHWN (SEQ ID NO: 7313) | WIRQFP GKKLEW MG (SEQ ID NO: 6004) | YIYSSGS TSYNPSL KS (SEQ ID NO: 6001) | RISITRD TSKNQFF LQLNSV TTEDTA TYYCAR (SEQ ID NO: 6005) | GNWHYF DF (SEQ ID NO: 6002) | WGQGT MVTVSS (SEQ ID NO: 6006) |
| 15H6-HC | QIQLQES GPGLVK PSQSLSL TCSVTGF SINTG (SEQ ID NO: 7317) | GYHWN (SEQ ID NO: 7313) | WIRQFP GKKLEW MG (SEQ ID NO: 6011) | YIYSSGT TRYNPSL KS (SEQ ID NO: 6008) | RISITRD TSKNQFF LQLNSV TPEDTAT YYCTR (SEQ ID NO: 6012) | GNWHYF DY (SEQ ID NO: 6009) | WGQGTL VAVSS (SEQ ID NO: 6013) |
| 9G1-HC_1 | QIQLQES GPGLVK PSETLSL TCTVSGF SINTG (SEQ ID NO: 7371) | GYHWN (SEQ ID NO: 7313) | WIRQPA GKGLEW IG (SEQ ID NO: 6015) | YIYSSGS TSYNPSL KS (SEQ ID NO: 6001) | RVTMSR DTSKNQ FSLKLSS VTAADT AVYYCA R (SEQ ID NO: 6016) | GNWHYF DF (SEQ ID NO: 6002) | WGQGT MVTVSS (SEQ ID NO: 6017) |
| 9G1-HC_2 | QIQLQES GPGLVK PSQTLSL TCTVSGF SINTG (SEQ ID NO: 7372) | GYHWN (SEQ ID NO: 7313) | WIRQHP GKGLEW IG (SEQ ID NO: 6019) | YIYSSGS TSYNPSL KS (SEQ ID NO: 6001) | LVTISRD TSKNQFS LKLSSVT AADTAV YYCAR (SEQ ID NO: 6020) | GNWHYF DF (SEQ ID NO: 6002) | WGQGT MVTVSS (SEQ ID NO: 6021) |
| 9G1-HC_3 | EIQLLES GGGLVQ PGGSLRL SCAVSG FSINTG (SEQ ID NO: 7373) | GYHWN (SEQ ID NO: 7313) | WVRQAP GKGLEW VG (SEQ ID NO: 6023) | YIYSSGS TSYNPSL KS (SEQ ID NO: 6001) | RFTISRD TSKNTF YLQMNS LRAEDT AVYYCA R (SEQ ID NO: 6024) | GNWHYF DF (SEQ ID NO: 6002) | WGQGT MVTVSS (SEQ ID NO: 6025) |
| 9G1-HC_4 | QIQLVQS GAEVKK PGSSVK VSCKVS GFSINTG (SEQ ID NO: 7374) | GYHWN (SEQ ID NO: 7313) | WVRQAP GQGLEW MG (SEQ ID NO: 6027) | YIYSSGS TSYNPSL KS (SEQ ID NO: 6001) | RVTITRD TSTNTFY MELSSL RSEDTA VYYCAR (SEQ ID NO: 6028) | GNWHYF DF (SEQ ID NO: 6002) | WGQGT MVTVSS (SEQ ID NO: 6029) |
| 9G1-HC_5 | EIQLVES GGGLVQ PGGSLRL SCAVSG FSINTG (SEQ ID NO: 7375) | GYHWN (SEQ ID NO: 7313) | WVRQAP GKGLEW VG (SEQ ID NOL 6032) | YIYSSGS TSYNPSL KS (SEQ ID NO: 6001) | RFTISRD TAKNSF YLQMNS LRAEDT AVYYCA R (SEQ ID NO: 6033) | GNWHYF DF (SEQ ID NO: 6002) | WGQGT MVTVSS (SEQ ID NO: 6034) |
| 9G1-HC_6 | QIQLVQS GAEVKK PGASVK VSCKVS GFSINTG (SEQ ID NO: 7376) | GYHWN (SEQ ID NO: 7313) | WVRQAP GQGLEW MG (SEQ ID NO: 6036) | YIYSSGS TSYNPSL KS (SEQ ID NO: 6001) | RVTMTR DTSTNTF YMELSS LRSEDT AVYYCA R (SEQ ID NO: 6037) | GNWHYF DF (SEQ ID NO: 6002) | WGQGT MVTVSS (SEQ ID NO: 6038) |
| 15H6-HC_1 | QIQLQES GPGLVK PSQTLSL TCTVSGF | GYHWN (SEQ ID NO: 7313) | WIRQHP GKGLEW IG (SEQ | YIYSSGT TRYNPSL KS (SEQ | LVTISRD TSKNQFS LKLSSVT AADTAV | GNWHYF DY (SEQ ID NO: 6009) | WGQGTL VTVSS (SEQ ID NO: 6042) |
| | SINTG (SEQ ID NO: 7372) | | ID NO: 6040) | ID NO: 6008) | YYCAR (SEQ ID NO: 6041) | | |
| 15H6-HC_2 | QIQLQES GPGLVK PSETLSL TCTVSGF SINTG (SEQ ID NO: 7371) | GYHWN (SEQ ID NO: 7313) | WIRQPA GKGLEW IG (SEQ ID NO: 6044) | YIYSSGT TRYNPSL KS (SEQ ID NO: 6008) | RVTMSR DTSKNQ FSLKLSS VTAADT AVYYCA R (SEQ ID NO: 6045) | GNWHYF DY (SEQ ID NO: 6009) | WGQGTL VTVSS (SEQ ID NO: 6046) |
| 15H6-HC_3 | EIQLLES GGGLVQ PGGSLRL SCAVSG FSINTG (SEQ ID NO: 7373) | GYHWN (SEQ ID NO: 7313) | WVRQAP GKGLEW VG (SEQ ID NO: 6048) | YIYSSGT TRYNPSL KS (SEQ ID NO: 6008) | RFTISRD TSKNTF YLQMNS LRAEDT AVYYCA R (SEQ ID NO: 6049) | GNWHYF DY (SEQ ID NO: 6009) | WGQGTL VTVSS (SEQ ID NO: 6050) |
| 15H6-HC_4 | QIQLVES GGGLVK PGGSLRL SCAVSG FSINTG (SEQ ID NO: 7377) | GYHWN (SEQ ID NO: 7313) | WIRQAP GKGLEW VG (SEQ ID NO: 6052) | YIYSSGT TRYNPSL KS (SEQ ID NO: 6008) | RFTISRD TAKNSF YLQMNS LRAEDT AVYYCA R (SEQ ID NO: 6053) | GNWHYF DY (SEQ ID NO: 6009) | WGQGTL VTVSS (SEQ ID NO: 6054) |
| 15H6-HC_5 | QIQLVQS GAEVKK PGASVK VSCKVS GFSINTG (SEQ ID NO: 7376) | GYHWN (SEQ ID NO: 7313) | WVRQAP GQGLEW MG (SEQ ID NO: 6056) | YIYSSGT TRYNPSL KS (SEQ ID NO: 6008) | RVTMTR DTSTNTF YMELSS LRSEDT AVYYCA R (SEQ ID NO: 6057) | GNWHYF DY (SEQ ID NO: 6009) | WGQGTL VTVSS (SEQ ID NO: 6058) |
| 15H6-HC_6 | EIQLVQS GAEVKK PGATVKI SCKVSG FSINTG (SEQ ID NO: 7378) | GYHWN (SEQ ID NO: 7313) | WVQQAP GKGLEW MG (SEQ ID NO: 6060) | YIYSSGT TRYNPSL KS (SEQ ID NO: 6008) | RVTITRD TSTNTFY MELSSL RSEDTA VYYCAR (SEQ ID NO: 6061) | GNWHYF DY (SEQ ID NO: 6009) | WGQGTL VTVSS (SEQ ID NO: 6062) |
| 9D9-HC | QIQLQES GPGLVK PSQSLSL SCSVTGF SINTG (SEQ ID NO: 7312) | GYHWN (SEQ ID NO: 7313) | WIRQFP GKKVEW MG (SEQ ID NO: 7314) | YIYSSGT TKYNPS LKS (SEQ ID NO: 7385) | RISITRD TSKNQFF LQLNSV TTEDTA TYYCAR (SEQ ID NO: 6005) | GDWHYF DY (SEQ ID NO: 7315) | WGQGT MVAVSS (SEQ ID NO: 7316) |
| 3A12-HC | QIQLQES GPGLVK PSQSLSL TCSVTGF SINTG (SEQ ID NO: 7317) | GYHWN (SEQ ID NO: 7313) | WIRQFP GKKLEW MG (SEQ ID NO: 6004) | YIYSSGS TRYNPSL KS (SEQ ID NO: 7318) | RFSITRD TSKNQFF LQLNSV TTEDTA TYYCTR (SEQ ID NO: 7319) | GNWHYF DY (SEQ ID NO: 6009) | WGQGTL VAVSS (SEQ ID NO: 6013) |
| 12D10-HC | QIQLQES GPGLVK PSQSLSL TCSVTGF SINTG (SEQ ID NO: 7317) | GYHWN (SEQ ID NO: 7313) | WIRQFP GKKLEW MG (SEQ ID NO: 6004) | YIYSSGT TRYNPSL KS (SEQ ID NO: 6008) | RISITRD TSKNQFF LQLNSV TPEDTAT YYCTR (SEQ ID NO: 6012) | GNWHYF DY (SEQ ID NO: 6009) | WGQGTL VAVSS (SEQ ID NO: 6013) |
| 15E1-HC | QIQLQES GPGLVK PSQSLSL SCSVTGF SITTT (SEQ ID NO: 7322) | GYHWN (SEQ ID NO: 7313) | WIRQFP GKKLEW MG (SEQ ID NO: 6004) | YIYSSGS TSYNPSL KS (SEQ ID NO: 6001) | RFSITRD TSKNQFF LQLNSV TTEDTA TYYCAR (SEQ ID NO: 7323) | GDWHYF DY (SEQ ID NO: 7315) | WGPGTM VTVSS (SEQ ID NO: 7324) |
| 15E1_ Humanize d variant_V H1 | QIQLQES GPGLVK PSQTLSL TCTVSGF SITTT (SEQ ID NO: 7330) | GYHWN (SEQ ID NO: 7313) | WIRQHP GKGLEW IG (SEQ ID NO: 6019) | YIYSSGS TSYNPSL KS (SEQ ID NO: 6001) | LVTISRD TSKNQFS LKLSSVT AADTAV YYCAR (SEQ ID NO: 6020) | GDWHYF DY (SEQ ID NO: 7315) | WGQGT MVTVSS (SEQ ID NO: 6006) |
| 15E1_ Humanize d variant_V H2 | QIQLVES GGGLVK PGGSLRL SCAVSG FSITTT (SEQ ID NO: 7331) | GYHWN (SEQ ID NO: 7313) | WIRQAP GKGLEW VG (SEQ ID NO: 6052) | YIYSSGS TSYNPSL KS (SEQ ID NO: 6001) | RFTISRD TAKNSF YLQMNS LRAEDT AVYYCA R (SEQ ID NO: 6033) | GDWHYF DY (SEQ ID NO: 7315) | WGQGT MVTVSS (SEQ ID NO: 6006) |
| 15E1_ Humanize d variant_V H3 | EIQLLES GGGLVQ PGGSLRL SCAVSG FSITTT (SEQ ID NO: 7332) | GYHWN (SEQ ID NO: 7313) | WVRQAP GKGLEW VG (SEQ ID NO: 6023) | YIYSSGS TSYNPSL KS (SEQ ID NO: 6001) | RFTISRD TSKNTF YLQMNS LRAEDT AVYYCA R (SEQ ID NO: 6024) | GDWHYF DY (SEQ ID NO: 7315) | WGQGT MVTVSS (SEQ ID NO: 6006) |
| 15E1_ Humanize d variant_V H4 | EIQLVES GGGLVQ PGGSLRL SCAVSG FSITTT (SEQ ID NO: 7333) | GYHWN (SEQ ID NO: 7313) | WVRQAP GKGLEW VG (SEQ ID NO: 6023) | YIYSSGS TSYNPSL KS (SEQ ID NO: 6001) | RFTISRD TAKNSF YLQMNS LRAEDT AVYYCA R (SEQ ID NO: 6033) | GDWHYF DY (SEQ ID NO: 7315) | WGQGT MVTVSS (SEQ ID NO: 6006) |
| 15E1_ Humanize d variant_V H5 | QIQLVQS GAEVKK PGASVK VSCKVS GFSITTT (SEQ ID NO: 7334) | GYHWN (SEQ ID NO: 7313) | WVRQAP GQGLEW MG (SEQ ID NO: 6027) | YIYSSGS TSYNPSL KS (SEQ ID NO: 6001) | RVTMTR DTSTNTF YMELSS LRSEDT AVYYCA R (SEQ ID NO: 6037) | GDWHYF DY (SEQ ID NO: 7315) | WGQGT MVTVSS (SEQ ID NO: 6006) |

TABLE 8

Exemplary light chain CDRs and FWRs of NKp30-targeting antigen binding domains

| Ab ID | VLFWR1 | VLCDR1 | VLFWR2 | VLCDR2 | VLFWR3 | VLCDR3 | VLFWR4 |
|---|---|---|---|---|---|---|---|
| 9G1-LC | SYTLTQP PLLSVAL GHKATIT C (SEQ ID NO: 6066) | SGERLSD KYVH (SEQ ID NO: 6063) | WYQQKP GRAPVM VIY (SEQ ID NO: 6067) | ENDKRP S (SEQ ID NO: 6064) | GIPDQFS GSNSGNI ATLTISK AQAGYE ADYYC (SEQ ID NO: 7292) | QSWDST NSAV (SEQ ID NO: 7293) | FGSGTQ LTVL (SEQ ID NO: 6069) |
| 15H6-LC | SYTLTQP PSLSVAP GQKATII C (SEQ ID NO: 6073) | SGENLS DKYVH (SEQ ID NO: 6070) | WYQQKP GRAPVM VIY (SEQ ID NO: 6074) | ENEKRPS (SEQ ID NO: 6071) | GIPDQFS GSNSGNI ATLTISK AQPGSE ADYYC (SEQ ID NO: 6075) | HYWESI NSVV (SEQ ID NO: 6072) | FGSGTH LTVL (SEQ ID NO: 6076) |
| 9G1-LC_1 | QSVTTQ PPSVSGA PGQRVTI SC (SEQ ID NO: 6077) | SGERLSD KYVH (SEQ ID NO: 6063) | WYQQLP GTAPKM LIY (SEQ ID NO: 6078) | ENDKRP S (SEQ ID NO: 6064) | GVPDRF SGSNSG NSASLAI TGLQAE DEADYY C (SEQ ID NO: 6079) | QSWDST NSAV (SEQ ID NO: 7293) | FGGGTQ LTVL (SEQ ID NO: 6080) |
| 9G1-LC_2 | QSVTTQ PPSASGT PGQRVTI SC (SEQ ID NO: 6081) | SGERLSD KYVH (SEQ ID NO: 6063) | WYQQLP GTAPKM LIY (SEQ ID NO: 6082) | ENDKRP S (SEQ ID NO: 6064) | GVPDRF SGSNSG NSASLAI SGLQSE DEADYY C (SEQ ID NO: 6083) | QSWDST NSAV (SEQ ID NO: 7293) | FGGGTQ LTVL (SEQ ID NO: 6084) |
| 9G1-LC_3 | QSVTTQ PPSASGT PGQRVTI SC (SEQ ID NO: 6085) | SGERLSD KYVH (SEQ ID NO: 6063) | WYQQLP GTAPKM LIY (SEQ ID NO: 6086) | ENDKRP S (SEQ ID NO: 6064) | GVPDRF SGSNSG NSASLAI SGLRSED EADYYC (SEQ ID NO: 6087) | QSWDST NSAV (SEQ ID NO: 7293) | FGGGTQ LTVL (SEQ ID NO: 6088) |
| 9G1-LC_4 | SSETTQP HSVSVA TAQMAR ITC (SEQ ID NO: 6089) | SGERLSD KYVH (SEQ ID NO: 6063) | WYQQKP GQDPVM VIY (SEQ ID NO: 6090) | ENDKRP S (SEQ ID NO: 6064) | GIPERFS GSNPGN TATLTIS RIEAGDE ADYYC (SEQ ID NO: 6091) | QSWDST NSAV (SEQ ID NO: 7293) | FGGGTQ LTVL (SEQ ID NO: 6092) |
| 9G1-LC_5 | DIQMTQ SPSTLSA SVGDRV TITC (SEQ ID NO: 6093) | SGERLSD KYVH (SEQ ID NO: 6063) | WYQQKP GKAPKM LIY (SEQ ID NO: 6094) | ENDKRP S (SEQ ID NO: 6064) | GVPSRFS GSNSGN EATLTIS SLQPDDF ATYYC (SEQ ID NO: 6095) | QSWDST NSAV (SEQ ID NO: 7293) | FGQGTK VEIK (SEQ ID NO: 6096) |
| 15H6-LC_1 | QYVLTQ PPSASGT PGQRVTI SC (SEQ | SGENLS DKYVH (SEQ ID NO: 6070) | WYQQLP GTAPKM LIY (SEQ | ENEKRPS (SEQ ID NO: 6071) | GVPDRF SGSNSG NSASLAI SGLQSE | HYWESI NSVV (SEQ ID NO: 6072) | FGEGTEL TVL (SEQ ID NO: 6100) |
| | ID NO: 6097) | | ID NO: 6098) | | DEADYY C (SEQ ID NO: 6099) | | |
| 15H6-LC_2 | QYVLTQ PPSASGT PGQRVTI SC (SEQ ID NO: 6101) | SGENLS DKYVH (SEQ ID NO: 6070) | WYQQLP GTAPKM LIY (SEQ ID NO: 6102) | ENEKRPS (SEQ ID NO: 6071) | GVPDRF SGSNSG NSASLAI SGLRSED EADYYC (SEQ ID NO: 6103) | HYWESI NSVV (SEQ ID NO: 6072) | FGEGTEL TVL (SEQ ID NO: 6104) |
| 15H6-LC_3 | SYELTQP PSVSVSP GQTASIT C (SEQ ID NO: 6105) | SGENLS DKYVH (SEQ ID NO: 6070) | WYQQKP GQSPVM VIY (SEQ ID NO: 6106) | ENEKRPS (SEQ ID NO: 6071) | GIPERFS GSNSGN TATLTIS GTQAMD EADYYC (SEQ ID NO: 6107) | HYWESI NSVV (SEQ ID NO: 6072) | FGEGTEL TVL (SEQ ID NO: 6108) |
| 15H6-LC_4 | DYVLTQ SPLSLPV TPGEPAS ISC (SEQ ID NO: 6109) | SGENLS DKYVH (SEQ ID NO: 6070) | WYLQKP GQSPQM LIY (SEQ ID NO: 6110) | ENEKRPS (SEQ ID NO: 6071) | GVPDRF SGSNSG NDATLKI SRVEAE DVGVYY C (SEQ ID NO: 6111) | HYWESI NSVV (SEQ ID NO: 6072) | FGQGTK VEIK (SEQ ID NO: 6112) |
| 15H6-LC_5 | AYQLTQ SPSSLSA SVGDRV TITC (SEQ ID NO: 6113) | SGENLS DKYVH (SEQ ID NO: 6070) | WYQQKP GKAPKM LIY (SEQ ID NO: 6114) | ENEKRPS (SEQ ID NO: 6071) | GVPSRFS GSNSGN DATLTIS SLQPEDF ATYYC (SEQ ID NO: 6115) | HYWESI NSVV (SEQ ID NO: 6072) | FGQGTK VEIK (SEQ ID NO: 6116) |
| 15H6-LC_6 | EYVLTQ SPATLSV SPGERAT LSC (SEQ ID NO: 6117) | SGENLS DKYVH (SEQ ID NO: 6070) | WYQQKP GQAPRM LIY (SEQ ID NO: 6118) | ENEKRPS (SEQ ID NO: 6071) | GIPARFS GSNSGN EATLTIS SLQSEDF AVYYC (SEQ ID NO: 6119) | HYWESI NSVV (SEQ ID NO: 6072) | FGQGTK VEIK (SEQ ID NO: 6120) |
| 9D9-LC | SYTLTQP PLVSVA LGQKATI IC (SEQ ID NO: 7320) | SGENLS DKYVH (SEQ ID NO: 6070) | WYQQKP GRAPVM VIY (SEQ ID NO: 6067) | ENDKRP S (SEQ ID NO: 6064) | GIPDQFS GSNSGNI ATLTISK AQAGYE ADYYC (SEQ ID NO: 7292) | HCWDST NSAV (SEQ ID NO: 7321) | FGSGTH LTVL (SEQ ID NO: 6076) |
| 3A12-LC | SYTLTQP PLVSVA LGQKATI IC (SEQ ID NO: 7320) | SGENLS DKYVH (SEQ ID NO: 6070) | WYQQKP GRAPVM VIY (SEQ ID NO: 6067) | ENDKRP S (SEQ ID NO: 6064) | GIPDQFS GSNSGNI ATLTISK AQAGYE ADYYC (SEQ ID NO: 7292) | HCWDST NSAV (SEQ ID NO: 7321) | FGSGTH LTVL (SEQ ID NO: 6076) |
| 12D10-LC | SYTLTQP PSLSVAP GQKATII C (SEQ ID NO: 6073) | SGENLS DKYVH (SEQ ID NO: 6070) | WYQQKP GRAPVM VIY (SEQ ID NO: 6074) | ENEKRPS (SEQ ID NO: 6071) | GIPDQFS GSNSGNI ATLTISK AQPGSE ADYYC (SEQ ID NO: 6075) | HYWESI NSVV (SEQ ID NO: 6072) | FGSGTH LTVL (SEQ ID NO: 6076) |
| 15E1-LC | SFTLTQP PLVSVA VGQVAT ITC (SEQ ID NO: 7325) | SGEKLS DKYVH (SEQ ID NO: 7326) | WYQQKP GRAPVM VIY (SEQ ID NO: 6067) | ENDRRP S (SEQ ID NO: 7327) | GIPDQFS GSNSGNI ASLTISK AQAGDE ADYFC (SEQ ID NO: 7328) | QFWDST NSAV (SEQ ID NO: 7329) | FGGGTQ LTVL (SEQ ID NO: 6080) |
| 15E1_ Humanize d variant_V L1 | SSETTQP PSVSVSP GQTASIT C (SEQ ID NO: 7335) | SGEKLS DKYVH (SEQ ID NO: 7326) | WYQQKP GQSPVM VIY (SEQ ID NO: 6106) | ENDRRP S (SEQ ID NO: 7327) | GIPERFS GSNSGN TATLTIS GTQAMD EADYFC (SEQ ID NO: 7336) | QFWDST NSAV (SEQ ID NO: 7329) | FGGGTQ LTVL (SEQ ID NO: 6080) |
| 15E1_ Humanize d variant_V L2 | SSETTQP HSVSVA TAQMAR ITC (SEQ ID NO: 6089) | SGEKLS DKYVH (SEQ ID NO: 7326) | WYQQKP GQDPVM VIY (SEQ ID NO: 6090) | ENDRRP S (SEQ ID NO: 7327) | GIPERFS GSNPGN TATLTIS RIEAGDE ADYFC (SEQ ID NO: 7337) | QFWDST NSAV (SEQ ID NO: 7329) | FGGGTQ LTVL (SEQ ID NO: 6080) |
| 15E1_ Humanize d variant_V L3 | QSVTTQ PPSASGT PGQRVTI SC (SEQ ID NO: 6081) | SGEKLS DKYVH (SEQ ID NO: 7326) | WYQQLP GTAPKM LIY (SEQ ID NO: 6078) | ENDRRP S (SEQ ID NO: 7327) | GVPDRF SGSNSG NSASLAI SGLRSED EADYFC (SEQ ID NO: 7338) | QFWDST NSAV (SEQ ID NO: 7329) | FGGGTQ LTVL (SEQ ID NO: 6080) |
| 15E1_ Humanize d variant_V L4 | QSVTTQ PPSVSGA PGQRVTI SC (SEQ ID NO: 6077) | SGEKLS DKYVH (SEQ ID NO: 7326) | WYQQLP GTAPKM LIY (SEQ ID NO: 6078) | ENDRRP S (SEQ ID NO: 7327) | GVPDRF SGSNSG NSASLAI TGLQAE DEADYF C (SEQ ID NO: 7339) | QFWDST NSAV (SEQ ID NO: 7329) | FGGGTQ LTVL (SEQ ID NO: 6080) |
| 15E1_ Humanize d variant_V L5 | DSVTTQ SPLSLPV TLGQPA SISC (SEQ ID NO: 7340) | SGEKLS DKYVH (SEQ ID NO: 7326) | WYQQRP GQSPRM LIY (SEQ ID NO: 7341) | ENDRRP S (SEQ ID NO: 7327) | GVPDRF SGSNSG NDATLKI SRVEAE DVGVYF C (SEQ ID NO: 7342) | QFWDST NSAV (SEQ ID NO: 7329) | FGGGTK VEIK (SEQ ID NO: 233) |

TABLE 8A

Exemplary heavy chain CDRs and FWRs of NKp30-targeting antigen binding domains

| | | | | | | | |
|---|---|---|---|---|---|---|---|
| Ab ID | VHFWR1 | VHCDR1 | VHFWR2 | VHCDR2 | VHFWR3 | VHCDR3 | VHFWR4 |
| BKM0138 | EIQLLES GGGLVQ PGGSLRL SCAVSG FS (SEQ ID NO: 18) | ITTTGYH WN (SEQ ID NO: 19) | WVRGAP GKGLEW VG (SEQ ID NO: 20) | YIYSSGS TSYNPSL KS (SEQ ID NO: 21) | RFTISRD TSKNTF YLQMNS LRAEDT AVYYCA R (SEQ ID NO: 22) | GDWHYF DY (SEQ ID NO: 23) | WGQGT MVTVSS (SEQ ID NO: 24) |
| BKM0139 | EIQLLES GGGLVQ PGGSLRL SCAVSG FS (SEQ ID NO: 32) | ITTTGYH WN (SEQ ID NO: 33) | WVRQAP GKGLEW VG (SEQ ID NO: 34) | YIYSSGS TSYNPSL KS (SEQ ID NO: 35) | RFTISRD TSKNTF YLQMNS LRAEDT AVYYCA R (SEQ ID NO: 36) | GDWHYF DY (SEQ ID NO: 37) | WGQGT MVTVSS (SEQ ID NO: 38) |
| BKM0140 | EIQLLES GGGLVQ PGGSLRL SCAVSG FS (SEQ ID NO: 46) | ITTTGYH WN (SEQ ID NO: 47) | WVRQAP GKGLEW VG (SEQ ID NO: 48) | YIYSSGS TSYNPSL KS (SEQ ID NO: 49) | RFTISRD TSKNTF YLQMNS LRAEDT AVYYCA R (SEQ ID NO: 50) | GDWHYF DY (SEQ ID NO: 51) | WGQGT MVTVSS (SEQ ID NO: 52) |
| BKM0141 | EIQLLES GGGLVQ PGGSLRL SCAVSG FS (SEQ ID NO: 60) | ITTTGYH WN (SEQ ID NO: 61) | WVRQAP GKGLEW VG (SEQ ID NO: 62) | YIYSSGS TSYNPSL KS (SEQ ID NO: 63) | RFTISRD TSKNTF YLQMNS LRAEDT AVYYCA R (SEQ ID NO: 64) | GDWHYF DY (SEQ ID NO: 65) | WGQGT MVTVSS (SEQ ID NO: 66) |
| BKM0142 | EIQLLES GGGLVQ PGGSLRL SCAVSG FS (SEQ ID NO: 74) | ITTTGYH WN (SEQ ID NO: 7397) | WVRQAP GKGLEW VG (SEQ ID NO: 7398) | YIYSSGS TSYAPSL KS (SEQ ID NO: 7399) | RFTISRD TSKNTF YLQMNS LRAEDT AVYYCA R (SEQ ID NO: 7400) | GDWHYF DY (SEQ ID NO: 79) | WGQGT MVTVSS (SEQ ID NO: 80) |
| BKM0143 | EIQLLES GGGLVQ PGGSLRL SCAVSG FS (SEQ ID NO: 88) | ITTTGYH WN (SEQ ID NO: 89) | WVRQAP GKGLEW VG (SEQ ID NO: 90) | YIYSSGS TSYAPSL KS (SEQ ID NO: 91) | RFTISRD TSKNTF YLQMNS LRAEDT AVYYCA R (SEQ ID NO: 92) | GDWHYF DY (SEQ ID NO: 93) | WGQGT MVTVSS (SEQ ID NO: 94) |
| BKM0144 | EIQLLES GGGLVQ PGGSLRL SCAVSG FS (SEQ ID NO: 102) | ITTTGYH WN (SEQ ID NO: 103) | WVRQAP GKGLEW VG (SEQ ID NO: 104) | YIYSSGS TSYAPSL KS (SEQ ID NO: 105) | RFTISRD TSKNTF YLQMNS LRAEDT AVYYCA R (SEQ ID NO: 106) | GDWHYF DY (SEQ ID NO: 107) | WGQGT MVTVSS (SEQ ID NO: 108) |
| BKM0145 | EIQLLES GGGLVQ PGGSLRL SCAVSG FS (SEQ ID NO: 115) | ITTTGYH WN (SEQ ID NO: 116) | WVRQAP GKGLEW VG (SEQ ID NO: 117) | YIYSSGS TSYAPSL KS (SEQ ID NO: 118) | RFTISRD TSKNTF YLQMNS LRAEDT AVYYCA R (SEQ ID NO: 119) | GDWHYF DY (SEQ ID NO: 120) | WGQGT MVTVSS (SEQ ID NO: 121) |

TABLE 8B

Exemplary light chain CDRs and FWRs of NKp30-targeting antigen binding domains

| | | | | | | | |
|---|---|---|---|---|---|---|---|
| Ab ID | VLFWR1 | VLCDR1 | VLFWR2 | VLCDR2 | VLFWR3 | VLCDR3 | VLFWR4 |
| BKM0138 | DSVTTQ SPLSLPV TLGQPA SISC (SEQ ID NO: 25) | SGEKLS DKYVH (SEQ ID NO: 26) | WYQQRP GQSPRM LIY (SEQ ID NO: 27) | ENDRRP S (SEQ ID NO: 28) | GVPDRF SGSNSG NDATLKI SRVEAE DVGVYF C (SEQ ID NO: 29) | QFWDST ASAV (SEQ ID NO: 30) | FGGGTK VEIK (SEQ ID NO: 31) |
| BKM0139 | DSVTTQ SPLSLPV TLGQPA SISC (SEQ ID NO: 39) | SGEKLS DKYVH (SEQ ID NO: 40) | WYQQRP GQSPRM LIY (SEQ ID NO: 41) | ENDRRP S (SEQ ID NO: 7393) | GVPDRF, SGSNSG NDATLKI SRVEAE DVGVYF C (SEQ ID NO: 7394) | QFWAST NSAV (SEQ ID NO: 7395) | FGGGTK VEIK (SEQ ID NO: 7396) |
| BKM0140 | SSETTQP PSVSVSP GQTASIT C (SEQ ID NO: 53) | SGEKLS DKYVH (SEQ ID NO: 54) | WYQQKP GQSPVM VIY (SEQ ID NO: 55) | ENDRRP S (SEQ ID NO: 56) | GIPERFS GSNSGN TATLTIS GTQAMD EADYFC (SEQ ID NO: 57) | QFWAST N SAV (SEQ ID NO: 58) | FGGGTQ LTVL (SEQ ID NO: 59) |
| BKM0141 | SSETTQP PSVSVSP GQTASIT C (SEQ ID NO: 67) | SGEKLS DKYVH (SEQ ID NO: 68) | WYQQKP GQSPVM VIY (SEQ ID NO: 69) | ENDRRP S (SEQ ID NO: 70) | GIPERFS GSNSGN TATLTIS GTQAMD EADYFC (SEQ ID NO: 71) | QFWDST ASAV (SEQ ID NO: 72) | FGGGTQ LTVL (SEQ ID NO: 73) |
| BKM0142 | DSVTTQ SPLSLPV TLGQPA SISC (SEQ ID NO: 81) | SGEKLS DKYVH (SEQ ID NO: 82) | WYQQRP GQSPRM LIY (SEQ ID NO: 83) | ENDRRP S (SEQ ID NO: 84) | GVPDRF SGSNSG NDATLKI SRVEAE DVGVYF C (SEQ ID NO: 85) | QFWDST N SA V (SEQ ID NO: 86) | FGGGTK VEIK (SEQ ID NO: 87) |
| BKM0143 | SSETTQP PSVSVSP GQTASIT C (SEQ ID NO: 95) | SGEKLS DKYVH (SEQ ID NO: 96) | WYQQKP GQSPVM VIY (SEQ ID NO: 97) | ENDRRP S (SEQ ID NO: 98) | GIPERFS GSNSGN TATLTIS GTQAMD EADYFC (SEQ ID NO: 99) | QFWDST N SAV (SEQ ID NO: 100) | FGGGTQ LTVL (SEQ ID NO: 101) |
| BKM0144 | DSVTTQ SPLSLPV TLGQPA SISC (SEQ ID NO: 109) | SGEKLS DKYVH (SEQ ID NO: 110) | WY QQRP GQSPRM LIY (SEQ ID NO: 111) | ENDRRP S (SEQ ID NO: 112) | GVPDRF SGSNSG NDATLKI SRVEAE DVGVYF C (SEQ ID NO: 85) | QFWAST ASAV (SEQ ID NO: 113) | FGGGTK VEIK (SEQ ID NO: 114) |
| BKM0145 | SSETTQP PSVSVSP GQTASIT C (SEQ ID NO: 122) | SGEKLS DKYVH (SEQ ID NO: 123) | WYQQKP GQSPVM VIY (SEQ ID NO: 124) | ENDRRP S (SEQ ID NO: 125) | GIPERFS GSNSGN TATLTIS GTQAMD EADYFC (SEQ ID NO: 126) | QFWAST ASAV (SEQ ID NO: 127) | FGGGTQ LTVL (SEQ ID NO: 128) |

TABLE 9

Exemplary variable regions of NKp30-targeting antigen binding domains

| | | | |
|---|---|---|---|
| SEQ ID NO | Ab ID | Description | Sequence |
| SEQ ID NO: 6121 | 9G1-HC | 9G1 heavy chain variable region | QIQLQESGPGLVKPSQSLSLTCSVTGFSINTGGYHWNWI RQFPGKKLEWMGYIYSSGSTSYNPSLKSRISITRDTSKN QFFLQLNSVTTEDTATYYCARGNWHYFDFWGQGTMV TVSS |
| SEQ ID NO: 6122 | 15H6-HC | 15H6 heavy chain variable region | QIQLQESGPGLVKPSQSLSLTCSVTGFSINTGGYHWNWI RQFPGKKLEWMGYIYSSGTTRYNPSLKSRISITRDTSKN QFFLQLNSVTPEDTATYYCTRGNWHYFDYWGQGTLVA VSS |
| SEQ ID NO: 6123 | 9G1-HC_1 | 9G1 heavy chain variable region humanized variant 1 | QIQLQESGPGLVKPSETLSLTCTVSGFSINTGGYHWNWI RQPAGKGLEWIGYIYSSGSTSYNPSLKSRVTMSRDTSK NQFSLKLSSVTAADTAVYYCARGNWHYFDFWGQGTM VTVSS |
| SEQ ID NO: 6124 | 9G1-HC_2 | 9G1 heavy chain variable region humanized variant 2 | QIQLQESGPGLVKPSQTLSLTCTVSGFSINTGGYHWNWI RQHPGKGLEWIGYIYSSGSTSYNPSLKSLVTISRDTSKN QFSLKLSSVTAADTAVYYCARGNWHYFDFWGQGTMV TVSS |
| SEQ ID NO: 6125 | 9G1-HC_3 | 9G1 heavy chain variable region humanized variant 3 | EIQLLESGGGLVQPGGSLRLSCAVSGFSINTGGYHWNW VRQAPGKGLEWVGYIYSSGSTSYNPSLKSRFTISRDTSK NTFYLQMNSLRAEDTAVYYCARGNWHYFDFWGQGT MVTVSS |
| SEQ ID NO: 6126 | 9G1-HC_4 | 9G1 heavy chain variable region humanized variant 4 | QIQLVQSGAEVKKPGSSVKVSCKVSGFSINTGGYHWN WVRQAPGQGLEWMGYIYSSGSTSYNPSLKSRVTITRDT STNTFYMELSSLRSEDTAVYYCARGNWHYFDFWGQGT MVTVSS |
| SEQ ID NO: 6127 | 9G1-HC_5 | 9G1 heavy chain variable region humanized variant 5 | EIQLVESGGGLVQPGGSLRLSCAVSGFSINTGGYHWNW VRQAPGKGLEWVGYIYSSGSTSYNPSLKSRFTISRDTAK NSFYLQMNSLRAEDTAVYYCARGNWHYFDFWGQGTM VTVSS |
| SEQ ID NO: 6128 | 9G1-HC_6 | 9G1 heavy chain variable region humanized variant 6 | QIQLVQSGAEVKKPGASVKVSCKVSGFSINTGGYHWN WVRQAPGQGLEWMGYIYSSGSTSYNPSLKSRVTMTRD TSTNTFYMELSSLRSEDTAVYYCARGNWHYFDFWGQG TMVTVSS |
| SEQ ID NO: 6129 | 15H6-HC_1 | 15H6 heavy chain variable region humanized variant 1 | QIQLQESGPGLVKPSQTLSLTCTVSGFSINTGGYHWNWI RQHPGKGLEWIGYIYSSGTTRYNPSLKSLVTISRDTSKN QFSLKLSSVTAADTAVYYCARGNWHYFDYWGQGTLV TVSS |
| SEQ ID NO: 6130 | 15H6-HC_2 | 15H6 heavy chain variable region humanized variant 2 | QIQLQESGPGLVKPSETLSLTCTVSGFSINTGGYHWNWI RQPAGKGLEWIGYIYSSGTTRYNPSLKSRVTMSRDTSK NQFSLKLSSVTAADTAVYYCARGNWHYFDYWGQGTL VTVSS |
| SEQ ID NO: 6131 | 15H6-HC_3 | 15H6 heavy chain variable region humanized variant 3 | EIQLLESGGGLVQPGGSLRLSCAVSGFSINTGGYHWNW VRQAPGKGLEWVGYIYSSGTTRYNPSLKSRFTISRDTSK NTFYLQMNSLRAEDTAVYYCARGNWHYFDYWGQGTL VTVSS |
| SEQ ID NO: 6132 | 15H6-HC_4 | 15H6 heavy chain variable region humanized variant 4 | QIQLVESGGGLVKPGGSLRLSCAVSGFSINTGGYHWNW IRQAPGKGLEWVGYIYSSGTTRYNPSLKSRFTISRDTAK NSFYLQMNSLRAEDTAVYYCARGNWHYFDYWGQGTL VTVSS |
| SEQ ID NO: 6133 | 15H6-HC_5 | 15H6 heavy chain variable region humanized variant 5 | QIQLVQSGAEVKKPGASVKVSCKVSGFSINTGGYHWN WVRQAPGQGLEWMGYIYSSGTTRYNPSLKSRVTMTRD TSTNTFYMELSSLRSEDTAVYYCARGNWHYFDYWGQ GTLVTVSS |
| SEQ ID NO: 6134 | 15H6-HC_6 | 15H6 heavy chain variable region humanized variant 6 | EIQLVQSGAEVKKPGATVKISCKVSGFSINTGGYHWNW VQQAPGKGLEWMGYIYSSGTTRYNPSLKSRVTITRDTS TNTFYMELSSLRSEDTAVYYCARGNWHYFDYWGQGT LVTVSS |
| SEQ ID NO: 7294 | 9G1-LC | 9G1 light chain variable region | SYTLTQPPLLSVALGHKATITCSGERLSDKYVHWYQQK PGRAPVMVIYENDKRPSGIPDQFSGSNSGNIATLTISKA QAGYEADYYCQSWDSTNSAVFGSGTQLTVL |
| SEQ ID NO: 6136 | 15H6-LC | 15H6 light chain variable region | SYTLTQPPSLSVAPGQKATIICSGENLSDKYVHWYQQK PGRAPVMVIYENEKRPSGIPDQFSGSNSGNIATLTISKAQ PGSEADYYCHYWESINSVVFGSGTHLTVL |
| SEQ ID NO: 6137 | 9G1-LC_1 | 9G1 light chain variable region humanized variant 1 | QSVTTQPPSVSGAPGQRVTISCSGERLSDKYVHWYQQL PGTAPKMLIYENDKRPSGVPDRFSGSNSGNSASLAITGL QAEDEADYYCQSWDSTNSAVFGGGTQLTVL |
| SEQ ID NO: 6138 | 9G1-LC_2 | 9G1 light chain variable region humanized variant 2 | QSVTTQPPSASGTPGQRVTISCSGERLSDKYVHWYQQL PGTAPKMLIYENDKRPSGVPDRFSGSNSGNSASLAISGL QSEDEADYYCQSWDSTNSAVFGGGTQLTVL |
| SEQ ID NO: 6139 | 9G1-LC_3 | 9G1 light chain variable region | QSVTTQPPSASGTPGQRVTISCSGERLSDKYVHWYQQL PGTAPKMLIYENDKRPSGVPDRFSGSNSGNSASLAISGL RSEDEADYYCQSWDSTNSAVFGGGTQLTVL |
| | | humanized variant 3 | |
| SEQ ID NO: 6140 | 9G1-LC_4 | 9G1 light chain variable region humanized variant 4 | SSETTQPHSVSVATAQMARITCSGERLSDKYVHWYQQ KPGQDPVMVIYENDKRPSGIPERFSGSNPGNTATLTISRI EAGDEADYYCQSWDSTNSAVFGGGTQLTVL |
| SEQ ID NO: 6141 | 9G1-LC_5 | 9G1 light chain variable region humanized variant 5 | DIQMTQSPSTLSASVGDRVTITCSGERLSDKYVHWYQQ KPGKAPKMLIYENDKRPSGVPSRFSGSNSGNEATLTISS LQPDDFATYYCQSWDSTNSAVFGQGTKVEIK |
| SEQ ID NO: 6142 | 15H6-LC_1 | 15H6 light chain variable region humanized variant 1 | QYVLTQPPSASGTPGQRVTISCSGENLSDKYVHWYQQL PGTAPKMLIYENEKRPSGVPDRFSGSNSGNSASLAISGL QSEDEADYYCHYWESINSVVFGEGTELTVL |
| SEQ ID NO: 6143 | 15H6-LC_2 | 15H6 light chain variable region humanized variant 2 | QYVLTQPPSASGTPGQRVTISCSGENLSDKYVHWYQQL PGTAPKMLIYENEKRPSGVPDRFSGSNSGNSASLAISGL RSEDEADYYCHYWESINSVVFGEGTELTVL |
| SEQ ID NO: 6144 | 15H6-LC_3 | 15H6 light chain variable region humanized variant 3 | SYELTQPPSVSVSPGQTASITCSGENLSDKYVHWYQQK PGQSPVMVIYENEKRPSGIPERFSGSNSGNTATLTISGTQ AMDEADYYCHYWESINSVVFGEGTELTVL |
| SEQ ID NO: 6145 | 15H6-LC_4 | 15H6 light chain variable region humanized variant 4 | DYVLTQSPLSLPVTPGEPASISCSGENLSDKYVHWYLQ KPGQSPQMLIYENEKRPSGVPDRFSGSNSGNDATLKISR VEAEDVGVYYCHYWESINSVVFGQGTKVEIK |
| SEQ ID NO: 6146 | 15H6-LC_5 | 15H6 light chain variable region humanized variant 5 | AYQLTQSPSSLSASVGDRVTITCSGENLSDKYVHWYQQ KPGKAPKMLIYENEKRPSGVPSRFSGSNSGNDATLTISS LQPEDFATYYCHYWESINSVVFGQGTKVEIK |
| SEQ ID NO: 6147 | 15H6-LC_6 | 15H6 light chain variable region humanized variant 6 | EYVLTQSPATLSVSPGERATLSCSGENLSDKYVHWYQQ KPGQAPRMLIYENEKRPSGIPARFSGSNSGNEATLTISSL QSEDFAVYYCHYWESINSVVFGQGTKVEIK |
| SEQ ID NO: 7295 | 9D9-HC | 9D9 heavy chain variable region | QIQLQESGPGLVKPSQSLSLSCSVTGFSINTGGYHWNWI RQFPGKKVEWMGYIYSSGTTKYNPSLKSRISITRDTSKN QFFLQLNSVTTEDTATYYCARGDWHYFDYWGQGTMV AVSS |
| SEQ ID NO: 7296 | 9D9-LC | 9D9 light chain variable region | SYTLTQPPLVSVALGQKATIICSGENLSDKYVHWYQQK PGRAPVMVIYENDKRPSGIPDQFSGSNSGNIATLTISKA QAGYEADYYCHCWDSTNSAVFGSGTHLTVL |
| SEQ ID NO: 7297 | 3A12-HC | 3A12 heavy chain variable region | QIQLQESGPGLVKPSQSLSLTCSVTGFSINTGGYHWNWI RQFPGKKLEWMGYIYSSGSTRYNPSLKSRFSITRDTSKN QFFLQLNSVTTEDTATYYCTRGNWHYFDYWGQGTLV AVSS |
| SEQ ID NO: 7296 | 3A12-LC | 3A12 light chain variable region | SYTLTQPPLVSVALGQKATIICSGENLSDKYVHWYQQK PGRAPVMVIYENDKRPSGIPDQFSGSNSGNIATLTISKA QAGYEADYYCHCWDSTNSAVFGSGTHLTVL |
| SEQ ID NO: 6122 | 12D10-HC | 12D10 heavy chain variable region | QIQLQESGPGLVKPSQSLSLTCSVTGFSINTGGYHWNWI RQFPGKKLEWMGYIYSSGTTRYNPSLKSRISITRDTSKN QFFLQLNSVTPEDTATYYCTRGNWHYFDYWGQGTLVA VSS |
| SEQ ID NO: 6136 | 12D10-LC | 12D10 light chain variable region | SYTLTQPPSLSVAPGQKATIICSGENLSDKYVHWYQQK PGRAPVMVIYENEKRPSGIPDQFSGSNSGNIATLTISKAQ PGSEADYYCHYWESINSVVFGSGTHLTVL |
| SEQ ID NO: 7298 | 15E1-HC | 15E1 heavy chain variable region | QIQLQESGPGLVKPSQSLSLSCSVTGFSITTTGYHWNWI RQFPGKKLEWMGYIYSSGSTSYNPSLKSRFSITRDTSKN QFFLQLNSVTTEDTATYYCARGDWHYFDYWGPGTMV TVSS |
| SEQ ID NO: 7299 | 15E1-LC | 15E1 light chain variable region | SFTLTQPPLVSVAVGQVATITCSGEKLSDKYVHWYQQK PGRAPVMVIYENDRRPSGIPDQFSGSNSGNIASLTISKAQ AGDEADYFCQFWDSTNSAVFGGGTQLTVL |
| SEQ ID NO: 7300 | 15E1_ Humanized variant_VH 1 | 15E1 heavy chain variable region humanized variant 1 | QIQLQESGPGLVKPSQTLSLTCTVSGFSITTTGYHWNWI RQHPGKGLEWIGYIYSSGSTSYNPSLKSLVTISRDTSKN QFSLKLSSVTAADTAVYYCARGDWHYFDYWGQGTMV TVSS |
| SEQ ID NO: 7301 | 15E1_ Humanized variant_VH 2 | 15E1 heavy chain variable region humanized variant 2 | QIQLVESGGGLVKPGGSLRLSCAVSGFSITTTGYHWNW IRQAPGKGLEWVGYIYSSGSTSYNPSLKSRFTISRDTAK NSFYLQMNSLRAEDTAVYYCARGDWHYFDYWGQGT MVTVSS |
| SEQ ID NO: 7302 | 15E1_ Humanized variant_VH 3 (BJM0407 VH and BJM0411 VH) | 15E1 heavy chain variable region humanized variant 3 | EIQLLESGGGLVQPGGSLRLSCAVSGFSITTTGYHWNW VRQAPGKGLEWVGYIYSSGSTSYNPSLKSRFTISRDTSK NTFYLQMNSLRAEDTAVYYCARGDWHYFDYWGQGT MVTVSS |
| SEQ ID NO: 7303 | 15E1_ Humanized variant_VH 4 | 15E1 heavy chain variable region humanized variant 4 | EIQLVESGGGLVQPGGSLRLSCAVSGFSITTTGYHWNW VRQAPGKGLEWVGYIYSSGSTSYNPSLKSRFTISRDTAK NSFYLQMNSLRAEDTAVYYCARGDWHYFDYWGQGT MVTVSS |
| SEQ ID NO: 7304 | 15E1_ Humanized variant_VH 5 | 15E1 heavy chain variable region humanized variant 5 | QIQLVQSGAEVKKPGASVKVSCKVSGFSITTTGYHWN WVRQAPGQGLEWMGYIYSSGSTSYNPSLKSRVTMTRD TSTNTFYMELSSLRSEDTAVYYCARGDWHYFDYWGQ GTMVTVSS |
| SEQ ID NO: 7305 | 15E1_ Humanized variant_VL 1 (BJM0407 VL) | 15E1 light chain variable region humanized variant 1 | SSETTQPPSVSVSPGQTASITCSGEKLSDKYVHWYQQKP GQSPVMVIYENDRRPSGIPERFSGSNSGNTATLTISGTQ AMDEADYFCQFWDSTNSAVFGGGTQLTVL |
| SEQ ID NO: 7306 | 15E1_ Humanized variant_VL 2 | 15E1 light chain variable region humanized variant 2 | SSETTQPHSVSVATAQMARITCSGEKLSDKYVHWYQQ KPGQDPVMVIYENDRRPSGIPERFSGSNPGNTATLTISRI EAGDEADYFCQFWDSTNSAVFGGGTQLTVL |
| SEQ ID NO: 7307 | 15E1_ Humanized variant_VL 3 | 15E1 light chain variable region humanized variant 3 | QSVTTQPPSASGTPGQRVTISCSGEKLSDKYVHWYQQL PGTAPKMLIYENDRRPSGVPDRFSGSNSGNSASLAISGL RSEDEADYFCQFWDSTNSAVFGGGTQLTVL |
| SEQ ID NO: 7308 | 15E1_ Humanized variant_VL 4 | 15E1 light chain variable region humanized variant 4 | QSVTTQPPSVSGAPGQRVTISCSGEKLSDKYVHWYQQL PGTAPKMLIYENDRRPSGVPDRFSGSNSGNSASLAITGL QAEDEADYFCQFWDSTNSAVFGGGTQLTVL |
| SEQ ID NO: 7309 | 15E1_ Humanized variant_VL 5 (BJM0411 VL) | 15E1 light chain variable region humanized variant 5 | DSVTTQSPLSLPVTLGQPASISCSGEKLSDKYVHWYQQ RPGQSPRMLIYENDRRPSGVPDRFSGSNSGNDATLKISR VEAEDVGVYFCQFWDSTNSAVFGGGTKVEIK |
| SEQ ID NO: 1 | BKM0138 VH | BKM0138 heavy chain variable region | EIQLLESGGGLVQPGGSLRLSCAVSGFSITTTGYHWNW VRQAPGKGLEWVGYIYSSGSTSYNPSLKSRFTISRDTSK NTFYLQMNSLRAEDTAVYYCARGDWHYFDYWGQGT MVTVSS |
| SEQ ID NO: 2 | BKM0139 VH | BKM0139 heavy chain variable region | EIQLLESGGGLVQPGGSLRLSCAVSGFSITTTGYHWNW VRQAPGKGLEWVGYIY SSGSTSYNPSLKSRFTISRDTSK NTFYLQMNSLRAEDTAVYYCARGDWHYFDYWGQGT MVTVSS |
| SEQ ID NO: 3 | BKM0140 VH | BKM0140 heavy chain variable region | EIQLLESGGGLVQPGGSLRLSCAVSGFSITTTGYHWNW VRQAPGKGLEWVGYIYSSGSTSYNPSLKSRFTISRDTSK NTFYLQMNSLRAEDTAVYYCARGDWHYFDYWGQGT MVTVSS |
| SEQ ID NO: 4 | BKM0141 VH | BKM0141 heavy chain variable region | EIQLLESGGGLVQPGGSLRLSCAVSGFSITTTGYHWNW VRQAPGKGLEWVGYIYSSGSTSYNPSLKSRFTISRDTSK NTFYLQMNSLRAEDTAVYYCARGDWHYFDYWGQGT MVTVSS |
| SEQ ID NO: 5 | BKM0142 VH | BKM0142 heavy chain variable region | EIQLLESGGGLVQPGGSLRLSCAVSGFSITTTGYHWNW VRQAPGKGLEWVGYIY SSGSTSYAPSLKSRFTISRIDTSK NTFYLQMNSLRAEDTAVYYCARGDWHYFDYWGQGT MVTVSS |
| SEQ ID NO: 6 | BKM0143 VH | BKM0143 heavy chain variable region | EIQLLESGGGLVQPGGSLRLSCAVSGFSITTTGYHWNW VRQAPGKGLEWVGYIYSSGSTSYAPSLKSRFTISRDTSK NTFYLQMNSLRAEDTAVYYCARGDWHYFDYWGQGT MVTVSS |
| SEQ ID NO: 7 | BKM0144 VH | BKM0144 heavy chain variable region | EIQLLESGGGLVQPGGSLRLSCAVSGFSITTTGYHWNW VRQAPGKGLEWVGYIY SSGSTSYAPSLKSRFTISRDTSK NTFYLQMNSLRAEDTAVYYCARGDWHYFDYWGQGT MVTVSS |
| SEQ ID NO: 8 | BKM0145 VH | BKM0145 heavy chain variable region | EIQLLESGGGLVQPGGSLRLSCAVSGFSITTTGYHWNW VRQAPGKOLEWVGYIYSSGSTSYAPSLKSRFTISRDTSK |
| | | | NTFYLQMNSLRAEDTAVYYCARGDWHYFDYWGQGT MVTVSS |
| SEQ ID NO: 9 | BKM0138 VL | BKM0138 light chain variable region | DSVTTQSPLSLPVTLGQPASISCSGEKLSDKYVHWYQQ RPGQSPRMLIYENDRRPSGVPDRFSGSNSGNDATLKISR VEAEDVGVYFCQFWDSTASAVFGGGTKVEIK |
| SEQ ID NO: 10 | BKM0139 VL | BKM0139 light chain variable region | DSVTTQSPLSLPVTLGQPASISCSGEKLSDKYVHWYQQ RPGQSPRMLIYENDRRPSGVPDRFSGSNSGNDATLKISR VEAEDVGVYFCQFWASTNSAVFGGGTKVEIK |
| SEQ ID NO: 11 | BKM0140 VL | BKM0140 light chain variable region | SSETTQPPSVSVSPGQTASITCSGEKLSDKYVHWYQQKP GQSPVMVIYENDRRPSGIPERFSGSNSGNTATLTISGTQ AMDEADYFCQFWASTNSAVFGGGTQLTVL |
| SEQ ID NO: 12 | BKM0141 VL | BKM0141 light chain variable region | SSETTQPPSVSVSPGQTASITCSGEKLSDKYVHWYQQKP GQSPVMVIYENDRRPSGIPERFSGSNSGNTATLTISGTQ AMDEADYFCQFWDSTASAVFGGGTQLTVL |
| SEQ ID NO: 13 | BKM0142 VL | BKM0142 light chain variable region | DSVTTQSPLSLPVTLGQPASISCSGEKLSDKYVHWYQQ RPGQSPRMLIYENDRRPSGVPDRFSGSNSGNDATLKISR VEAEDVGVYFCQFWDSTNSAVFGGGTKVEIK |
| SEQ ID NO: 14 | BKM0143 VL | BKM0143 light chain variable region | SSETTQPPSVSVSPGQTASITCSGEKLSDKYVHWYQQKP GQSPVMVIYENDRRPSGIPERFSGSNSGNTATLTISGTQ AMDEADYFCQFWDSTNSAVFGGGTQLTVL |
| SEQ ID NO: 15 | BKM0144 VL | BKM0144 light chain variable region | DSVTTQSPLSLPVTLGQPASISCSGEKLSDKYVHWYQQ RPGQSPRMLIYENDRRPSGVPDRFSGSNSGNDATLKISR VEAEDVGVYFCQFWASTASAVFGGGTKVEIK |
| SEQ ID NO: 16 | BKM0145 VL | BKM0145 light chain variable region | SSETTQPPSVSVSPGQTASITCSGEKLSDKYVHWYQQKP GQSPVMVIYENDRRPSGIPERFSGSNSGNTATLTISGTQ AMDEADYFCQFWASTASAVFGGGTQLTVL |

TABLE 10

Exemplary NKp30-targeting antigen binding domains/antibody molecules

| | | | |
|---|---|---|---|
| SEQ ID NO | Ab ID | Description | Sequence |
| SEQ ID NO: 6148 | Ch(anti-NKp30 9G1)HC N297A | 9G1 heavy chain | QIQLQESGPGLVKPSQSLSLTCSVTGFSINTGGYHWNWIRQ FPGKKLEWMGYIYSSGSTSYNPSLKSRISITRDTSKNQFFL QLNSVTTEDTATYYCARGNWHYFDFWGQGTMVTVSSAS TKGPSVFPLAPSSKSTSGGTAALGCLVKDYFPEPVTVSWN SGALTSGVHTFPAVLQSSGLYSLSSVVTVPSSSLGTQTYIC NVNHKPSNTKVDKRVEPKSCDKTHTCPPCPAPELLGGPSV FLFPPKPKDTLMISRTPEVTCVVVDVSHEDPEVKFNWYVD GVEVHNAKTKPREEQYASTYRVVSVLTVLHQDWLNGKE YKCKVSNKALPAPIEKTISKAKGQPREPQVCTLPPSREEMT KNQVSLSCAVKGFYPSDIAVEWESNGQPENNYKTTPPVLD SDGSFFLVSKLTVDKSRWQQGNVFSCSVMHEALHNHYTQ KSLSLSPGK |
| SEQ ID NO: 6149 | Ch(anti-NKp30 9G1)HC | 9G1 heavy chain | QIQLQESGPGLVKPSQSLSLTCSVTGFSINTGGYHWNWIRQ FPGKKLEWMGYIYSSGSTSYNPSLKSRISITRDTSKNQFFL QLNSVTTEDTATYYCARGNWHYFDFWGQGTMVTVSSAS TKGPSVFPLAPSSKSTSGGTAALGCLVKDYFPEPVTVSWN SGALTSGVHTFPAVLQSSGLYSLSSVVTVPSSSLGTQTYIC NVNHKPSNTKVDKRVEPKSCDKTHTCPPCPAPELLGGPSV FLFPPKPKDTLMISRTPEVTCVVVDVSHEDPEVKFNWYVD GVEVHNAKTKPREEQYNSTYRVVSVLTVLHQDWLNGKE YKCKVSNKALPAPIEKTISKAKGQPREPQVCTLPPSREEMT |
| | | | KNQVSLSCAVKGFYPSDIAVEWESNGQPENNYKTTPPVLD SDGSFFLVSKLTVDKSRWQQGNVFSCSVMHEALHNHYTQ KSLSLSPGK |
| SEQ ID NO: 6150 | Ch(anti-NKp30 9G1)LC | 9G1 light chain | SYTLTQPPLLSVALGHKATITCSGERLSDKYVHWYQQKPG RAPVMVIYENDKRPSGIPDQFSGSNSGNIATLTISKAQAGY EADYYCQSWDSTNSAVFGSGTQLTVLGQPKANPTVTLFPP SSEELQANKATLVCLISDFYPGAVTVAWKADGSPVKAGV ETTKPSKQSNNKYAASSYLSLTPEQWKSHRSYSCQVTHEG STVEKTVAPTECS |
| SEQ ID NO: 6151 | Ch(anti-NKp30 15H6)HC N297A | 15H6 heavy chain | QIQLQESGPGLVKPSQSLSLTCSVTGFSINTGGYHWNWIRQ FPGKKLEWMGYIYSSGTTRYNPSLKSRISITRDTSKNQFFL QLNSVTPEDTATYYCTRGNWHYFDYWGQGTLVAVSSAS TKGPSVFPLAPSSKSTSGGTAALGCLVKDYFPEPVTVSWN SGALTSGVHTFPAVLQSSGLYSLSSVVTVPSSSLGTQTYIC NVNHKPSNTKVDKRVEPKSCDKTHTCPPCPAPELLGGPSV FLFPPKPKDTLMISRTPEVTCVVVDVSHEDPEVKFNWYVD GVEVHNAKTKPREEQYASTYRVVSVLTVLHQDWLNGKE YKCKVSNKALPAPIEKTISKAKGQPREPQVCTLPPSREEMT KNQVSLSCAVKGFYPSDIAVEWESNGQPENNYKTTPPVLD SDGSFFLVSKLTVDKSRWQQGNVFSCSVMHEALHNHYTQ KSLSLSPGK |
| SEQ ID NO: 6152 | Ch(anti-NKp30 15H6)HC (hole) | 15H6 heavy chain | QIQLQESGPGLVKPSQSLSLTCSVTGFSINTGGYHWNWIRQ FPGKKLEWMGYIYSSGTTRYNPSLKSRISITRDTSKNQFFL QLNSVTPEDTATYYCTRGNWHYFDYWGQGTLVAVSSAS TKGPSVFPLAPSSKSTSGGTAALGCLVKDYFPEPVTVSWN SGALTSGVHTFPAVLQSSGLYSLSSVVTVPSSSLGTQTYIC NVNHKPSNTKVDKRVEPKSCDKTHTCPPCPAPELLGGPSV FLFPPKPKDTLMISRTPEVTCVVVDVSHEDPEVKFNWYVD GVEVHNAKTKPREEQYNSTYRVVSVLTVLHQDWLNGKE YKCKVSNKALPAPIEKTISKAKGQPREPQVCTLPPSREEMT KNQVSLSCAVKGFYPSDIAVEWESNGQPENNYKTTPPVLD SDGSFFLVSKLTVDKSRWQQGNVFSCSVMHEALHNHYTQ KSLSLSPGK |
| SEQ ID NO: 6153 | Ch(anti-NKp30 15H6)LC | 15H6 light chain | SYTLTQPPSLSVAPGQKATIICSGENLSDKYVHWYQQKPG RAPVMVIYENEKRPSGIPDQFSGSNSGNIATLTISKAQPGSE ADYYCHYWESINSVVFGSGTHLTVLGQPKANPTVTLFPPS SEELQANKATLVCLISDFYPGAVTVAWKADGSPVKAGVE TTKPSKQSNNKYAASSYLSLTPEQWKSHRSYSCQVTHEGS TVEKTVAPTECS |
| SEQ ID NO: 7310 | BJM0859 lambda scFv | | EIQLLESGGGLVQPGGSLRLSCAVSGFSITTTGYHWNWVR QAPGKGLEWVGYIYSSGSTSYNPSLKSRFTISRDTSKNTFY LQMNSLRAEDTAVYYCARGDWHYFDYWGQGTMVTVSS GGGGSGGGGSGGGGSGGGGSSSETTQPPSVSVSPGQTASI TCSGEKLSDKYVHWYQQKPGQSPVMVIYENDRRPSGIPER FSGSNSGNTATLTISGTQAMDEADYFCQFWDSTNSAVFGG GTQLTVL |
| SEQ ID NO: 7311 | BJM0860 kappa scFv | | EIQLLESGGGLVQPGGSLRLSCAVSGFSITTTGYHWNWVR QAPGKGLEWVGYIYSSGSTSYNPSLKSRFTISRDTSKNTFY LQMNSLRAEDTAVYYCARGDWHYFDYWGQGTMVTVSS GGGGSGGGGSGGGGSGGGGSDSVTTQSPLSLPVTLGQPAS ISCSGEKLSDKYVHWYQQRPGQSPRMLIYENDRRPSGVPD RFSGSNSGNDATLKISRVEAEDVGVYFCQFWDSTNSAVFG GGTKVEIK |
| SEQ ID NO: 17 | BKM0138 scFv | | EIQLLESGGGLVQPGGSLRLSCAVSGFSITTTGYHWNWVR QAPGKGLEWVGYIYSSGSTSYNPSLKSRFTISRDTSKNTFY LQMNSLRAEDTAVYYCARGDWHYFDYWGQGTMVTVSS GGGGSGGGGSGGGGSGGGGSDSVTTQSPLSLPVTLGQPAS ISCSGEKLSDKYVHWYQQRPGQSPRMLIYENDRRPSGVPD RFSGSNSGNDATLKISRVEAEDVGVYFCQFWDSTASAVFG GGTKVEIK |
| SEQ ID NO: 7386 | BKM0139 scFv | | EIQLLESGGGLVQPGGSLRLSCAVSGFSITTTGYHWNWVR QAPGKGLEWVGYIYSSGSTSYNPSLKSRFTISRDTSKNTFY LQMNSLRAEDTAVYYCARGDWHYFDYWGQGTMVTVSS GGGGSGGGGSGGGGSGGGGSDSVTTQSPLSLPVTLGQPAS ISCSGEKLSDKYVHWYQQRPGQSPRMLIYENDRRPSGVPD RFSGSNSGNDATLKISRVEAEDVGVYFCQFWASTNSAVFG GGTKVEIK |
| SEQ ID NO: 7387 | BKM0140 scFv | | EIQLLESGGGLVQPGGSLRLSCAVSGFSITTTGYHWNWVR QAPGKGLEWVGYIYSSGSTSYNPSLKSRFTISRDTSKNTFY LQMNSLRAEDTAVYYCARGDWHYFDYWGQGTMVTVSS GGGGSGGGGSGGGGSGGGGSSSETTQPPSVSVSPGQTASI TCSGEKLSDKYVHWYQQKPGQSPVMVIYENDRRPSGIPER FSGSNSGNTATLTISGTQAMDEADYFCQFWASTNSAVFGG GTQLTVL |
| SEQ ID NO: 7388 | BKM0141 scFv | | EIQLLESGGGLVQPGGSLRLSCAVSGFSITTTGYHWNWVR QAPGKGLEWVGYIYSSGSTSYNPSLKSRFTISRDTSKNTFY LQMNSLRAEDTAVYYCARGDWHYFDYWGQGTMVTVSS GGGGSGGGGSGGGGSGGGGSSSETTQPPSVSVSPGQTASI TCSGEKLSDKYVHWYQQKPGQSPVMVIYENDRRPSGIPER FSGSNSGNTATLTISGTQAMDEADYFCQFWDSTASAVFGG GTQLTVL |
| SEQ ID NO: 7389 | BKM0142 scFv | | EIQLLESGGGLVQPGGSLRLSCAVSGFSITTTGYHWNWVR QAPGKGLEWVGYIYSSGSTSYAPSLKSRFTISRDTSKNTFY LQMNSLRAEDTAVYYCARGDWHYFDYWGQGTMVTVSS GGGGSGGGGSGGGGSGGGGSDSVTTQSPLSLPVTLGQPAS ISCSGEKLSDKYVHWYQQRPGQSPRMLIYENDRRPSGVPD RFSGSNSGNDATLKISRVEAEDVGVYFCQFWDSTNSAVFG GGTKVEIK |
| SEQ ID NO: 7390 | BKM0143 scFv | | EIQLLESGGGLVQPGGSLRLSCAVSGFSITTTGYHWNWVR QAPGKGLEWVGYIYSSGSTSYAPSLKSRFTISRDTSKNTFY LQMNSLRAEDTAVYYCARGDWHYFDYWGQGTMVTVSS GGGGSGGGGSGGGGSGGGGSSSETTQPPSVSVSPGQTASI TCSGEKLSDKYVHWYQQKPGQSPVMVIYENDRRPSGIPER FSGSNSGNTATLTISGTQAMDEADYFCQFWDSTNSAVFGG GTQLTVL |
| SEQ ID NO: 7391 | BKM0144 scFv | | EIQLLESGGGLVQPGGSLRLSCAVSGFSITTTGYHWNWVR QAPGKGLEWVGYIYSSGSTSYAPSLKSRFTISRDTSKNTFY LQMNSLRAEDTAVYYCARGDWHYFDYWGQGTMVTVSS GGGGSGGGGSGGGGSGGGGSDSVTTQSPLSLPVTLGQPAS ISCSGEKLSDKYVHWYQQRPGQSPRMLIYENDRRPSGVPD RFSGSNSGNDATLKISRVEAEDVGVYFCQFWASTASAVFG GGTKVEIK |
| SEQ ID NO: 7392 | BKM0145 scFv | | EIQLLESGGGLVQPGGSLRLSCAVSGFSITTTGYHWNWVR QAPGKGLEWVGYIYSSGSTSYAPSLKSRFTISRDTSKNTFY LQMNSLRAEDTAVYYCARGDWHYFDYWGQGTMVTVSS GGGGSGGGGSGGGGSGGGGSSSETTQPPSVSVSPGQTASI |
| | | | TCSGEKLSDKYVHWYQQKPGQSPVMVIYENDRRPSGIPER FSGSNSGNTATLTISGTQAMDEADYFCQFWASTASAVFGG GTQLTVL |

[0175] In some embodiments, the NK cell engager is an antigen binding domain that binds to NKp46 (e.g., NKp46 present, e.g., expressed or displayed, on the surface of an NK cell) and comprises any CDR amino acid sequence, framework region (FWR) amino acid sequence, or variable region amino acid sequence disclosed in Table 15. In some embodiments, binding of the NK cell engager, e.g., antigen binding domain that binds to NKp46, to the NK cell activates the NK cell. An antigen binding domain that binds to NKp46 (e.g., NKp46 present, e.g., expressed or displayed, on the surface of an NK cell) may be said to target NKp46, the NK cell, or both.

[0176] In some embodiments, the NK cell engager is an antigen binding domain that binds to NKG2D (e.g., NKG2D present, e.g., expressed or displayed, on the surface of an NK cell) and comprises any CDR amino acid sequence, framework region (FWR) amino acid sequence, or variable region amino acid sequence disclosed in Table 15. In some embodiments, binding of the NK cell engager, e.g., antigen binding domain that binds to NKG2D, to the NK cell activates the NK cell. An antigen binding domain that binds to NKG2D (e.g., NKG2D present, e.g., expressed or displayed, on the surface of an NK cell) may be said to target NKG2D, the NK cell, or both.

[0177] In some embodiments, the NK cell engager is an antigen binding domain that binds to CD16 (e.g., CD16 present, e.g., expressed or displayed, on the surface of an NK cell) and comprises any CDR amino acid sequence, framework region (FWR) amino acid sequence, or variable region amino acid sequence disclosed in Table 15. In some embodiments, binding of the NK cell engager, e.g., antigen binding domain that binds to CD16, to the NK cell activates the NK cell. An antigen binding domain that binds to CD16 (e.g., CD16 present, e.g., expressed or displayed, on the surface of an NK cell) may be said to target CD16, the NK cell, or both.

TABLE 15

Exemplary variable regions of NKp46, NKG2D, or CD16-targeting antigen binding domains

| | | | |
|---|---|---|---|
| SEQ ID NO | Ab ID | Description | Sequence |
| SEQ ID NO: 6175 | NKG2D_ 1scFV | scFv that binds NKG2D | QVHLQESGPGLVKPSETLSLTCTVSDDSISSYYWSWIR QPPGKGLEWIGHISYSGSANYNPSLKSRVTISVDTSKN QFSLKLSSVTAADTAVYYCANWDDAFNIWGQGTMVT VSSGGGGSGGGGSGGGGSGGGGSEIVLTQSPGTLSLSP GERATLSCRASQSVSSSYLAWYQQKPGQAPRLLIYGA SSRATGIPDRFSGSGSGTDFTLTISRLEPEDFAVYYCQQ YGSSPWTFGQGTKVEIK |
| SEQ ID NO: 6176 | NKG2D_ 1VH | VH that binds NKG2D | QVHLQESGPGLVKPSETLSLTCTVSDDSISSYYWSWIR QPPGKGLEWIGHISYSGSANYNPSLKSRVTISVDTSKN QFSLKLSSVTAADTAVYYCANWDDAFNIWGQGTMVT VSS |
| SEQ ID NO: 6177 | NKG2D_ 1VL | VL that binds NKG2D | EIVLTQSPGTLSLSPGERATLSCRASQSVSSSYLAWYQ QKPGQAPRLLIYGASSRATGIPDRFSGSGSGTDFTLTIS RLEPEDFAVYYCQQYGSSPWTFGQGTKVEIK |
| SEQ ID NO: 6178 | NKG2D_ 2scFv | scFv that binds NKG2D | EVQLVQSGAEVKEPGESLKISCKNSGYSFTNYWVGWV RQMPGKGLEWMGIIYPGDSDTRYSPSFQGQVTISADKS INTAYLQWSSLKASDTAMYYCGRLTMFRGIIIGYFDY WGQGTLVTVSSGGGGSGGGGSGGGGSGGGGSEIVLT QSPATLSLSPGERATLSCRASQSVSSYLAWYQQKPGQ APRLLIYDASNRATGIPARFSGSGSGTDFTLTISSLEPED FAVYYCQQRSNWPWTFGQGTKVEIK |
| SEQ ID NO: 6179 | NKG2D_ 2VH | VH that binds NKG2D | EVQLVQSGAEVKEPGESLKISCKNSGYSFTNYWVGWV RQMPGKGLEWMGIIYPGDSDTRYSPSFQGQVTISADKS INTAYLQWSSLKASDTAMYYCGRLTMFRGIIIGYFDY WGQGTLVTVSS |
| SEQ ID NO: 6180 | NKG2D_ 2VL | VL that binds NKG2D | EIVLTQSPATLSLSPGERATLSCRASQSVSSYLAWYQQ KPGQAPRLLIYDASNRATGIPARFSGSGSGTDFTLTISSL EPEDFAVYYCQQRSNWPWTFGQGTKVEIK |
| SEQ ID NO: 6181 | NKp46scF v | scFv that binds NKp46 | QVQLQQSGPELVKPGASVKMSCKASGYTFTDYVINW GKQRSGQGLEWIGEIYPGSGTNYYNEKFKAKATLTAD KSSNIAYMQLSSLTSEDSAVYFCARRGRYGLYAMDY WGQGTSVTVSSGGGGSGGGGSGGGGSGGGGSDIQMT QTTSSLSASLGDRVTISCRASQDISNYLNWYQQKPDGT VKLLIYYTSRLHSGVPSRFSGSGSGTDYSLTINNLEQED IATYFCQQGNTRPWTFGGGTKLEIK |
| SEQ ID NO: 6182 | NKp46V H | VH that binds NKp46 | QVQLQQSGPELVKPGASVKMSCKASGYTFTDYVINW GKQRSGQGLEWIGEIYPGSGTNYYNEKFKAKATLTAD KSSNIAYMQLSSLTSEDSAVYFCARRGRYGLYAMDY WGQGTSVTVSS |
| SEQ ID NO: 6183 | NKp46VL | VL that binds NKp46 | DIQMTQTTSSLSASLGDRVTISCRASQDISNYLNWYQQ KPDGTVKLLIYYTSRLHSGVPSRFSGSGSGTDYSLTINN LEQEDIATYFCQQGNTRPWTFGGGTKLEIK |
| SEQ ID NO: 6184 | CD16scFv | scFv that binds CD16 | EVQLVESGGGVVRPGGSLRLSCAASGFTFDDYGMSW VRQAPGKGLEWVSGINWNGGSTGYADSVKGRFTISRD NAKNSLYLQMNSLRAEDTAVYYCARGRSLLFDYWGQ GTLVTVSRGGGGSGGGGSGGGGSSELTQDPAVSVALG QTVRITCQGDSLRSYYASWYQQKPGQAPVLVIYGKNN RPSGIPDRFSGSSSGNTASLTITGAQAEDEADYYCNSRD SSGNHVVFGGGTKLTVL |
| SEQ ID NO: 6185 | CD16VH | VH that binds CD16 | EVQLVESGGGVVRPGGSLRLSCAASGFTFDDYGMSW VRQAPGKGLEWVSGINWNGGSTGYADSVKGRFTISRD NAKNSLYLQMNSLRAEDTAVYYCARGRSLLFDYWGQ GTLVTVSR |
| SEQ ID NO: 6186 | CD16VL | VL that binds CD16 | SSELTQDPAVSVALGQTVRITCQGDSLRSYYASWYQQ KPGQAPVLVIYGKNNRPSGIPDRFSGSSSGNTASLTITG AQAEDEADYYCNSRDSSGNHVVFGGGTKLTVL |

[0178] In one embodiment, the NK cell engager is a ligand ofNKp30, e.g., is a B7-6, e.g., comprises the amino acid sequence of:

[0179] DLKVEMMAGGTQITPLNDNVTIFCNIFYSQPLNITSMGITWFWKSLTFDKEVKVFEFFGDH QEAFRPGAIVSPWRLKSGDASLRLPGIQLEEAGEYRCEVVVTPLKAQGTVQLEVVASPASRLLLDQV GMKENEDKYMCESSGFYPEAINITWEKQTQKFPHPIEISEDVITGPTIKNMDGTFNVTSCLKLNSSQE DPGTVYQCVVRHASLHTPLRSNFTLTAARHSLSETEKTDNFS (SEQ ID NO: 7233), a fragment thereof, or an amino acid sequence substantially identical thereto (e.g., 95% to 99.9% identical thereto, or having at least one amino acid alteration, but not more than five, ten or fifteen alterations (e.g., substitutions, deletions, or insertions, e.g., conservative substitutions) to the amino acid sequence of SEQ ID NO: 7233.

[0180] In other embodiments, the NK cell engager is a ligand of NKp44 or NKp46, which is a viral HA. Viral hemagglutinins (HA) are glyco proteins which are on the surface of viruses. HA proteins allow viruses to bind to the membrane of cells via sialic acid sugar moieties which contributes to the fusion of viral membranes with the cell membranes (see e.g., Eur J Immunol. 2001 Sep;31(9):2680-9 “Recognition of viral hemagglutinins by NKp44 but not by NKp30”; and Nature. 2001 Feb 22;409(6823):1055-60 “Recognition of haemagglutinins on virus-infected cells by NKp46 activates lysis by human NK cells” the contents of each of which are incorporated by reference herein).

[0181] In other embodiments, the NK cell engager is a ligand of NKG2D chosen from MICA, MICB, or ULBP1, e.g., wherein:
[0182] (i) MICA comprises the amino acid sequence:
   [0183] EPHSLRYNLTVLSWDGSVQSGFLTEVHLDGQPFLRCDRQKCRAKPQGQWAEDVLGNKTWDRETR DLTGNGKDLRMTLAHIKDQKEGLHSLQEIRVCEIHEDNSTRSSQHFYYDGELFLSQNLETKEWTMP QSSRAQTLAMNVRNFLKEDAMKTKTHYHAMHADCLQELRRYLKSGVVLRRTVPPMVNVTRSEAS EGNITVTCRASGFYPWNITLSWRQDGVSLSHDTQQWGDVLPDGNGTYQTWVATRICQGEEQRFTC YMEHSGNHSTHPVPSGKVLVLQSHW (SEQ ID NO: 7234), a fragment thereof, or an amino acid sequence substantially identical thereto (e.g., 95% to 99.9% identical thereto, or having at least one amino acid alteration, but not more than five, ten or fifteen alterations (e.g., substitutions, deletions, or insertions, e.g., conservative substitutions) to the amino acid sequence of SEQ ID NO: 7234;
[0184] (ii) MICB comprises the amino acid sequence:
   [0185] AEPHSLRYNLMVLSQDESVQSGFLAEGHLDGQPFLRYDRQKRRAKPQGQWAEDVLGAKTWDTET EDLTENGQDLRRTLTHIKDQKGGLHSLQEIRVCEIHEDSSTRGSRHFYYDGELFLSQNLETQESTVPQ SSRAQTLAMNVTNFWKEDAMKTKTHYRAMQADCLQKLQRYLKSGVAIRRTVPPMVNVTCSEVSE GNITVTCRASSFYPRNITLTWRQDGVSLSHNTQQWGDVLPDGNGTYQTWVATRIRQGEEQRFTCY MEHSGNHGTHPVPSGKVLVLQSQRTD (SEQ ID NO: 7235), a fragment thereof, or an amino acid sequence substantially identical thereto (e.g., 95% to 99.9% identical thereto, or having at least one amino acid alteration, but not more than five, ten or fifteen alterations (e.g., substitutions, deletions, or insertions, e.g., conservative substitutions) to the amino acid sequence of SEQ ID NO: 7235; or
[0186] (iii) ULBP1 comprises the amino acid sequence:
   [0187] GWVDTHCLCYDFIITPKSRPEPQWCEVQGLVDERPFLHYDCVNHKAKAFASLGKKVNVTKTWEEQ TETLRDVVDFLKGQLLDIQVENLIPIEPLTLQARMSCEHEAHGHGRGSWQFLFNGQKFLLFDSNNRK WTALHPGAKKMTEKWEKNRDVTMFFQKISLGDCKMWLEEFLMYWEQMLDPTKPPSLAPG (SEQ ID NO: 7236), a fragment thereof, or an amino acid sequence substantially identical thereto (e.g., 95% to 99.9% identical thereto, or having at least one amino acid alteration, but not more than five, ten or fifteen alterations (e.g., substitutions, deletions, or insertions, e.g., conservative substitutions) to the amino acid sequence of SEQ ID NO: 7236.

[0188] In other embodiments, the NK cell engager is a ligand of DNAM1 chosen from NECTIN2 or NECL5, e.g., wherein:
[0189] (i) NECTIN2 comprises the amino acid sequence:
   [0190] QDVRVQVLPEVRGQLGGTVELPCHLLPPVPGLYISLVTWQRPDAPANHQNVAAFHPKMGPSFPSPK PGSERLSFVSAKQSTGQDTEAELQDATLALHGLTVEDEGNYTCEFATFPKGSVRGMTWLRVIAKPK NQAEAQKVTFSQDPTTVALCISKEGRPPARISWLSSLDWEAKETQVSGTLAGTVTVTSRFTLVPSGR ADGVTVTCKVEHESFEEPALIPVTLSVRYPPEVSISGYDDNWYLGRTDATLSCDVRSNPEPTGYDWS TTSGTFPTSAVAQGSQLVIHAVDSLFNTTFVCTVTNAVGMGRAEQVIFVRETPNTAGAGATGG (SEQ ID NO: 7237), a fragment thereof, or an amino acid sequence substantially identical thereto (e.g., 95% to 99.9% identical thereto, or having at least one amino acid alteration, but not more than five, ten or fifteen alterations (e.g., substitutions, deletions, or insertions, e.g., conservative substitutions) to the amino acid sequence of SEQ ID NO: 7237; or
[0191] (ii) NECL5 comprises the amino acid sequence:
   [0192] WPPPGTGDVVVQAPTQVPGFLGDSVTLPCYLQVPNMEVTHVSQLTWARHGESGSMAVFHQTQGPS YSESKRLEFVAARLGAELRNASLRMFGLRVEDEGNYTCLFVTFPQGSRSVDIWLRVLAKPQNTAEV QKVQLTGEPVPMARCVSTGGRPPAQITWHSDLGGMPNTSQVPGFLSGTVTVTSLWILVPSSQVDGK NVTCKVEHESFEKPQLLTVNLTVYYPPEVSISGYDNNWYLGQNEATLTCDARSNPEPTGYNWSTTM GPLPPFAVAQGAQLLIRPVDKPINTTLICNVTNALGARQAELTVQVKEGPPSEHSGISRN (SEQ ID NO: 7238), a fragment thereof, or an amino acid sequence substantially identical thereto (e.g., 95% to 99.9% identical thereto, or having at least one amino acid alteration, but not more than five, ten or fifteen alterations (e.g., substitutions, deletions, or insertions, e.g., conservative substitutions) to the amino acid sequence of SEQ ID NO: 7238.

[0193] In yet other embodiments, the NK cell engager is a ligand of DAP10, which is an adapter for NKG2D (see e.g., Proc Natl Acad Sci U S A. 2005 May 24; 102(21): 7641-7646; and Blood, 15 Sep. 2011 Volume 118, Number 11, the full contents of each of which is incorporated by reference herein).

[0194] In other embodiments, the NK cell engager is a ligand of CD16, which is a CD16a/b ligand, e.g., a CD16a/b ligand further comprising an antibody Fc region (see e.g., Front Immunol. 2013; 4: 76 discusses how antibodies use the Fc to trigger NK cells through CD 16,the full contents of which are incorporated herein).

[0195] In other embodiments, the NK cell engager is a ligand of CRTAM, which is NECL2, e.g., wherein NECL2 comprises the amino acid sequence:

QNLFTKDVTVIEGEVATISCQVNKSDDSVIQLLNPNRQTIYFRDFRPLKD
SRFQLLNFSSSELKVSLTNVSISDEGRYFCQLYTDPPQESYTTITVLVPP
RNLMIDIQKDTAVEGEEIEVNCTAMASKPATTIRWFKGNTELKGKSEVEE
WSDMYTVTSQLMLKVHKEDDGVPVICQVEHPAVTGNLQTQRYLEVQYKPQ
VHIQMTYPLQGLTREGDALELTCEAIGKPQPVMVTWVRVDDEMPQHAVLS
GPNLFINNLNKTDNGTYRCEASNIVGKAHSDYMLYVYDPPTTIPPPTTTT
TTTTTTTTTILTIITDSRAGEEGSIRAVDH (SEQ ID NO: 7239),

a fragment thereof, or an amino acid sequence substantially identical thereto (e.g., 95% to 99.9% identical thereto, or having at least one amino acid alteration, but not more than five, ten or fifteen alterations (e.g., substitutions, deletions, or insertions, e.g., conservative substitutions) to the amino acid sequence of SEQ ID NO: 7239.

[0196] In other embodiments, the NK cell engager is a ligand of CD27, which is CD70, e.g., wherein CD70 comprises the amino acid sequence: QRFAQAQQQLPLESLGWDVAELQLNHTGPQQDPRLYWQGGPALGRSFLHGPELDKGQLRIHRDGI YMVHIQVTLAICSSTTASRHHPTTLAVGICSPASRSISLLRLSFHQGCTIASQRLTPLARGDTLCTNLT GTLLPSRNTDETFFGVQWVRP (SEQ ID NO: 7240), a fragment thereof, or an amino acid sequence substantially identical thereto (e.g., 95% to 99.9% identical thereto, or having at least one amino acid alteration, but not more than five, ten or fifteen alterations (e.g., substitutions, deletions, or insertions, e.g., conservative substitutions) to the amino acid sequence of SEQ ID NO: 7240.

[0197] In other embodiments, the NK cell engager is a ligand of PSGL1, which is L-selectin (CD62L), e.g., wherein L-selectin comprises the amino acid sequence: WTYHYSEKPMNWQRARRFCRDNYTDLVAIQNKAEIEYLEKTLPFSRSYYWIGIRKIGGIWTWVGTN KSLTEEAENWGDGEPNNKKNKEDCVEIYIKRNKDAGKWNDDACHKLKAALCYTASCQPWSCSGH GECVEIINNYTCNCDVGYYGPQCQFVIQCEPLEAPELGTMDCTHPLGNFSFSSQCAFSCSEGTNLTGI EETTCGPFGNWSSPEPTCQVIQCEPLSAPDLGIMNCSHPLASFSFTSACTFICSEGTELIGKKKTICESS GIWSNPSPICQKLDKSFSMIKEGDYN (SEQ ID NO: 7241), a fragment thereof, or an amino acid sequence substantially identical thereto (e.g., 95% to 99.9% identical thereto, or having at least one amino acid alteration, but not more than five, ten or fifteen alterations (e.g., substitutions, deletions, or insertions, e.g., conservative substitutions) to the amino acid sequence of SEQ ID NO: 7241.

[0198] In other embodiments, the NK cell engager is a ligand of CD96, which is NECL5, e.g., wherein NECL5 comprises the amino acid sequence:

WPPPGTGDVVVQAPTQVPGFLGDSVTLPCYLQVPNMEVTHVSQLTWARHG
ESGSMAVFHQTQGPSYSESKRLEFVAARLGAELRNASLRMFGLRVEDEGN
YTCLFVTFPQGSRSVDIWLRVLAKPQNTAEVQKVQLTGEPVPMARCVSTG
GRPPAQITWHSDLGGMPNTSQVPGFLSGTVTVTSLWILVPSSQVDGKNVT
CKVEHESFEKPQLLTVNLTVYYPPEVSISGYDNNWYLGQNEATLTCDARS
NPEPTGYNWSTTMGPLPPFAVAQGAQLLIRPVDKPINTTLICNVTNALGA
RQAELTVQVKEGPPSEHSGISRN (SEQ ID NO: 7238),

a fragment thereof, or an amino acid sequence substantially identical thereto (e.g., 95% to 99.9% identical thereto, or having at least one amino acid alteration, but not more than five, ten or fifteen alterations (e.g., substitutions, deletions, or insertions, e.g., conservative substitutions) to the amino acid sequence ofSEQ ID NO: 7238.

[0199] In other embodiments, the NK cell engager is a ligand of CD100 (SEMA4D), which is CD72, e.g., wherein CD72 comprises the amino acid sequence: RYLQVSQQLQQTNRVLEVTNSSLRQQLRLKITQLGQSAEDLQGSRRELAQSQEALQVEQRAHQAAE GQLQACQADRQKTKETLQSEEQQRRALEQKLSNMENRLKPFFTCGSADTCCPSGWIMHQKSCFYIS LTSKNWQESQKQCETLSSKLATFSEIYPQSHSYYFLNSLLPNGGSGNSYWTGLSSNKDWKLTDDTQ RTRTYAQSSKCNKVHKTWSWWTLESESCRSSLPYICEMTAFRFPD (SEQ ID NO: 7242), a fragment thereof, or an amino acid sequence substantially identical thereto (e.g., 95% to 99.9% identical thereto, or having at least one amino acid alteration, but not more than five, ten or fifteen alterations (e.g., substitutions, deletions, or insertions, e.g., conservative substitutions) to the amino acid sequence of SEQ ID NO: 7242.

[0200] In other embodiments, the NK cell engager is a ligand of NKp80, which is CLEC2B (AICL), e.g., wherein CLEC2B (AICL) comprises the amino acid sequence: KLTRDSQSLCPYDWIGFQNKCYYFSKEEGDWNSSKYNCSTQHADLTIIDNIEEMNFLRRYKCSSDH WIGLKMAKNRTGQWVDGATFTKSFGMRGSEGCAYLSDDGAATARCYTERKWICRKRIH (SEQ ID NO: 7243), a fragment thereof, or an amino acid sequence substantially identical thereto (e.g., 95% to 99.9% identical thereto, or having at least one amino acid alteration, but not more than five, ten or fifteen alterations (e.g., substitutions, deletions, or insertions, e.g., conservative substitutions) to the amino acid sequence of SEQ ID NO: 7243.

[0201] In other embodiments, the NK cell engager is a ligand of CD244, which is CD48, e.g., wherein CD48 comprises the amino acid sequence: QGHLVHMTVVSGSNVTLNISESLPENYKQLTWFYTFDQKIVEWDSRKSKYFESKFKGRVRLDPQSG ALYISKVQKEDNSTYIMRVLKKTGNEQEWKIKLQVLDPVPKPVIKIEKIEDMDDNCYLKLSCVIPGE SVNYTWYGDKRPFPKELQNSVLETTLMPHNYSRCYTCQVSNSVSSKNGTVCLSPPCTLARS (SEQ ID NO: 7244), a fragment thereof, or an amino acid sequence substantially identical thereto (e.g., 95% to 99.9% identical thereto, or having at least one amino acid alteration, but not more than five, ten or fifteen alterations (e.g., substitutions, deletions, or insertions, e.g., conservative substitutions) to the amino acid sequence of SEQ ID NO: 7244.

[0202] In some embodiments, the NK cell engager is a viral hemagglutinin (HA), HA is a glycoprotein found on the surface of influenza viruses. It is responsible for binding the virus to cells with sialic acid on the membranes, such as cells in the upper respiratory tract or erythrocytes. HA has at least 18 different antigens. These subtypes are named H1 through H18. NCRs can recognize viral proteins. NKp46 has been shown to be able to interact with the HA of influenza and the HA-NA of Paramyxovirus, including Sendai virus and Newcastle disease virus. Besides NKp46, NKp44 can also functionally interact with HA of different influenza subtypes.

### Antibody Molecules

[0203] In an embodiment, the anti-NKp30 antibody molecule is a monospecific antibody molecule and binds a single epitope on NKp30. E.g., a monospecific antibody molecule having a plurality of immunoglobulin variable domain sequences, each of which binds the same epitope.

[0204] In another embodiment, the anti-NKp30 antibody molecule is a multispecific or multifunctional antibody molecule, e.g., it comprises a plurality of immunoglobulin variable domains sequences, wherein a first immunoglobulin variable domain sequence of the plurality has binding specificity for a first epitope and a second immunoglobulin variable domain sequence of the plurality has binding specificity for a second epitope. In an embodiment the first and second epitopes are on the same antigen, e.g., the same protein (or subunit of a multimeric protein). In an embodiment the first and second epitopes overlap. In an embodiment the first and second epitopes do not overlap. In an embodiment the first and second epitopes are on different antigens, e.g., the different proteins (or different subunits of a multimeric protein). In an embodiment a multispecific antibody molecule comprises a third, fourth or fifth immunoglobulin variable domain. In an embodiment, a multispecific antibody molecule is a bispecific antibody molecule, a trispecific antibody molecule, or a tetraspecific antibody molecule.

[0205] In an embodiment a multispecific antibody molecule is a bispecific antibody molecule. A bispecific antibody has specificity for no more than two antigens. A bispecific antibody molecule is characterized by a first immunoglobulin variable domain sequence which has binding specificity for a first epitope and a second immunoglobulin variable domain sequence that has binding specificity for a second epitope. In an embodiment the first and second epitopes are on the same antigen, e.g., the same protein (or subunit of a multimeric protein). In an embodiment the first and second epitopes overlap. In an embodiment the first and second epitopes do not overlap. In an embodiment the first and second epitopes are on different antigens, e.g., the different proteins (or different subunits of a multimeric protein). In an embodiment a bispecific antibody molecule comprises a heavy chain variable domain sequence and a light chain variable domain sequence which have binding specificity for a first epitope and a heavy chain variable domain sequence and a light chain variable domain sequence which have binding specificity for a second epitope. In an embodiment a bispecific antibody molecule comprises a half antibody having binding specificity for a first epitope and a half antibody having binding specificity for a second epitope. In an embodiment a bispecific antibody molecule comprises a half antibody, or fragment thereof, having binding specificity for a first epitope and a half antibody, or fragment thereof, having binding specificity for a second epitope. In an embodiment a bispecific antibody molecule comprises a scFv or a Fab, or fragment thereof, have binding specificity for a first epitope and a scFv or a Fab, or fragment thereof, have binding specificity for a second epitope.

[0206] In an embodiment, an antibody molecule comprises a diabody, and a single-chain molecule, as well as an antigen-binding fragment of an antibody (e.g., Fab, F(ab′)₂, and Fv). For example, an antibody molecule can include a heavy (H) chain variable domain sequence (abbreviated herein as VH), and a light (L) chain variable domain sequence (abbreviated herein as VL). In an embodiment an antibody molecule comprises or consists of a heavy chain and a light chain (referred to herein as a half antibody. In another example, an antibody molecule includes two heavy (H) chain variable domain sequences and two light (L) chain variable domain sequence, thereby forming two antigen binding sites, such as Fab, Fab′, F(ab′)₂, Fc, Fd, Fd′, Fv, single chain antibodies (scFv for example), single variable domain antibodies, diabodies (Dab) (bivalent and bispecific), and chimeric (e.g., humanized) antibodies, which may be produced by the modification of whole antibodies or those synthesized de novo using recombinant DNA technologies. These functional antibody fragments retain the ability to selectively bind with their respective antigen or receptor. Antibodies and antibody fragments can be from any class of antibodies including, but not limited to, IgG, IgA, IgM, IgD, and IgE, and from any subclass (e.g., IgG1, IgG2, IgG3, and IgG4) of antibodies. The preparation of antibody molecules can be monoclonal or polyclonal. An antibody molecule can also be a human, humanized, CDR-grafted, or in vitro generated antibody. The antibody can have a heavy chain constant region chosen from, e.g., IgG1, IgG2, IgG3, or IgG4. The antibody can also have a light chain chosen from, e.g., kappa or lambda. The term “immunoglobulin” (Ig) is used interchangeably with the term “antibody” herein.

[0207] Examples of antigen-binding fragments of an antibody molecule include: (i) a Fab fragment, a monovalent fragment consisting of the VL, VH, CL and CH1 domains; (ii) a F(ab′)2 fragment, a bivalent fragment comprising two Fab fragments linked by a disulfide bridge at the hinge region; (iii) a Fd fragment consisting of the VH and CH1 domains; (iv) a Fv fragment consisting of the VL and VH domains of a single arm of an antibody, (v) a diabody (dAb) fragment, which consists of a VH domain; (vi) a camelid or camelized variable domain; (vii) a single chain Fv (scFv), see e.g., Bird et al. (1988) Science 242:423-426; and Huston et al. (1988) Proc. Natl. Acad. Sci. USA 85:5879-5883); (viii) a single domain antibody. These antibody fragments are obtained using conventional techniques known to those with skill in the art, and the fragments are screened for utility in the same manner as are intact antibodies.

[0208] Antibody molecules include intact molecules as well as functional fragments thereof. Constant regions of the antibody molecules can be altered, e.g., mutated, to modify the properties of the antibody (e.g., to increase or decrease one or more of: Fc receptor binding, antibody glycosylation, the number of cysteine residues, effector cell function, or complement function).

[0209] Antibody molecules can also be single domain antibodies. Single domain antibodies can include antibodies whose complementary determining regions are part of a single domain polypeptide. Examples include, but are not limited to, heavy chain antibodies, antibodies naturally devoid of light chains, single domain antibodies derived from conventional 4-chain antibodies, engineered antibodies and single domain scaffolds other than those derived from antibodies. Single domain antibodies may be any of the art, or any future single domain antibodies. Single domain antibodies may be derived from any species including, but not limited to mouse, human, camel, llama, fish, shark, goat, rabbit, and bovine. According to another aspect of the invention, a single domain antibody is a naturally occurring single domain antibody known as heavy chain antibody devoid of light chains. Such single domain antibodies are disclosed in WO 9404678, for example. For clarity reasons, this variable domain derived from a heavy chain antibody naturally devoid of light chain is known herein as a VHH or nanobody to distinguish it from the conventional VH of four chain immunoglobulins. Such a VHH molecule can be derived from antibodies raised in Camelidae species, for example in camel, llama, dromedary, alpaca and guanaco. Other species besides Camelidae may produce heavy chain antibodies naturally devoid of light chain; such VHHs are within the scope of the invention.

[0210] The VH and VL regions can be subdivided into regions of hypervariability, termed “complementarity determining regions” (CDR), interspersed with regions that are more conserved, termed “framework regions” (FR or FW).

[0211] The extent of the framework region and CDRs has been precisely defined by a number of methods (see, Kabat, E. A., et al. (1991) Sequences of Proteins of Immunological Interest, Fifth Edition, U.S. Department of Health and Human Services, NIH Publication No. 91-3242; Chothia, C. et al. (1987) J. Mol. Biol. 196:901-917; and the AbM definition used by Oxford Molecular’s AbM antibody modeling software. See, generally, e.g., Protein Sequence and Structure Analysis of Antibody Variable Domains. In: Antibody Engineering Lab Manual (Ed.: Duebel, S. and Kontermann, R., Springer-Verlag, Heidelberg).

[0212] The terms “complementarity determining region,” and “CDR,” as used herein refer to the sequences of amino acids within antibody variable regions which confer antigen specificity and binding affinity. In general, there are three CDRs in each heavy chain variable region (HCDR1, HCDR2, HCDR3) and three CDRs in each light chain variable region (LCDR1, LCDR2, LCDR3).

[0213] The precise amino acid sequence boundaries of a given CDR can be determined using any of a number of known schemes, including those described by Kabat et al. (1991), “Sequences of Proteins of Immunological Interest,” 5th Ed. Public Health Service, National Institutes of Health, Bethesda, MD (“Kabat” numbering scheme), Al-Lazikani et al., (1997) JMB 273,927-948 (“Chothia” numbering scheme). As used herein, the CDRs defined according the “Chothia” number scheme are also sometimes referred to as “hypervariable loops.”

[0214] For example, under Kabat, the CDR amino acid residues in the heavy chain variable domain (VH) are numbered 31-35 (HCDR1), 50-65 (HCDR2), and 95-102 (HCDR3); and the CDR amino acid residues in the light chain variable domain (VL) are numbered 24-34 (LCDR1), 50-56 (LCDR2), and 89-97 (LCDR3). Under Chothia, the CDR amino acids in the VH are numbered 26-32 (HCDR1), 52-56 (HCDR2), and 95-102 (HCDR3); and the amino acid residues in VL are numbered 26-32 (LCDR1), 50-52 (LCDR2), and 91-96 (LCDR3).

[0215] Each VH and VL typically includes three CDRs and four FRs, arranged from amino-terminus to carboxy-terminus in the following order: FR1, CDR1, FR2, CDR2, FR3, CDR3, FR4.

[0216] The antibody molecule can be a polyclonal or a monoclonal antibody.

[0217] The terms “monoclonal antibody” or “monoclonal antibody composition” as used herein refer to a preparation of antibody molecules of single molecular composition. A monoclonal antibody composition displays a single binding specificity and affinity for a particular epitope. A monoclonal antibody can be made by hybridoma technology or by methods that do not use hybridoma technology (e.g., recombinant methods).

[0218] The antibody can be recombinantly produced, e.g., produced by phage display or by combinatorial methods.

[0219] Phage display and combinatorial methods for generating antibodies are known in the art (as described in, e.g., Ladner et al. U.S. Pat. No. 5,223,409; Kang et al. International Publication No. WO 92/18619; Dower et al. International Publication No. WO 91/17271; Winter et al. International Publication WO 92/20791; Markland et al. International Publication No. WO 92/15679; Breitling et al. International Publication WO 93/01288; McCafferty et al. International Publication No. WO 92/01047; Garrard et al. International Publication No. WO 92/09690; Ladner et al. International Publication No. WO 90/02809; Fuchs et al. (1991) Bio/Technology 9:1370-1372; Hay et al. (1992) Hum Antibod Hybridomas 3:81-85; Huse et al. (1989) Science 246: 1275-1281; Griffths et al. (1993) EMBO J 12:725-734; Hawkins et al. (1992) J Mol Biol 226:889-896; Clackson et al. (1991) Nature 352:624-628; Gram et al. (1992) PNAS 89:3576-3580; Garrad et al. (1991) Bio/Technology 9:1373-1377; Hoogenboom et al. (1991) Nuc Acid Res 19:4133-4137; and Barbas et al. (1991) PNAS 88:7978-7982, the contents of all of which are incorporated by reference herein).

[0220] In one embodiment, the antibody is a fully human antibody (e.g., an antibody made in a mouse which has been genetically engineered to produce an antibody from a human immunoglobulin sequence), or a non-human antibody, e.g., a rodent (mouse or rat), goat, primate (e.g., monkey), camel antibody. Preferably, the non-human antibody is a rodent (mouse or rat antibody). Methods of producing rodent antibodies are known in the art.

[0221] Human monoclonal antibodies can be generated using transgenic mice carrying the human immunoglobulin genes rather than the mouse system. Splenocytes from these transgenic mice immunized with the antigen of interest are used to produce hybridomas that secrete human mAbs with specific affinities for epitopes from a human protein (see, e.g., Wood et al. International Application WO 91/00906, Kucherlapati et al. PCT publication WO 91/10741; Lonberg et al. International Application WO 92/03918; Kay et al. International Application 92/03917; Lonberg, N. et al. 1994 Nature 368:856-859; Green, L.L. et al. 1994 Nature Genet. 7:13-21; Morrison, S.L. et al. 1994 Proc. Natl. Acad. Sci. USA 81:6851-6855; Bruggeman et al. 1993 Year Immunol 7:33-40; Tuaillon et al. 1993 PNAS 90:3720-3724; Bruggeman et al. 1991 EurJ Immunol 21:1323-1326).

[0222] An antibody molecule can be one in which the variable region, or a portion thereof, e.g., the CDRs, are generated in a non-human organism, e.g., a rat or mouse. Chimeric, CDR-grafted, and humanized antibodies are within the invention. Antibody molecules generated in a non-human organism, e.g., a rat or mouse, and then modified, e.g., in the variable framework or constant region, to decrease antigenicity in a human are within the invention.

[0223] An “effectively human” protein is a protein that does substantially not evoke a neutralizing antibody response, e.g., the human anti-murine antibody (HAMA) response. HAMA can be problematic in a number of circumstances, e.g., if the antibody molecule is administered repeatedly, e.g., in treatment of a chronic or recurrent disease condition. A HAMA response can make repeated antibody administration potentially ineffective because of an increased antibody clearance from the serum (see, e.g., Saleh et al., Cancer Immunol. Immunother., 32:180-190 (1990)) and also because of potential allergic reactions (see, e.g., LoBuglio et al., Hybridoma, 5:5117-5123 (1986)).

[0224] Chimeric antibodies can be produced by recombinant DNA techniques known in the art (see Robinson et al., International Patent Publication PCT/US86/02269; Akira, et al., European Patent Application 184,187; Taniguchi, M., European Patent Application 171,496; Morrison et al., European Patent Application 173,494; Neuberger et al., International Application WO 86/01533; Cabilly et al. U.S. Pat. No. 4,816,567; Cabilly et al., European Patent Application 125,023; Better et al. (1988 Science 240:1041-1043); Liu et al. (1987) PNAS 84:3439-3443; Liu et al., 1987, J. Immunol. 139:3521-3526; Sun et al. (1987) PNAS 84:214-218; Nishimura et al., 1987, Canc. Res. 47:999-1005; Wood et al. (1985) Nature 314:446-449; and Shaw et al., 1988, J. Natl Cancer Inst. 80:1553-1559).

[0225] A humanized or CDR-grafted antibody will have at least one or two but generally all three recipient CDRs (of heavy and or light immuoglobulin chains) replaced with a donor CDR. The antibody may be replaced with at least a portion of a non-human CDR or only some of the CDRs may be replaced with non-human CDRs. It is only necessary to replace the number of CDRs required for binding to the antigen. Preferably, the donor will be a rodent antibody, e.g., a rat or mouse antibody, and the recipient will be a human framework or a human consensus framework. Typically, the immunoglobulin providing the CDRs is called the “donor” and the immunoglobulin providing the framework is called the “acceptor.” In one embodiment, the donor immunoglobulin is a non-human (e.g., rodent). The acceptor framework is a naturally-occurring (e.g., a human) framework or a consensus framework, or a sequence about 85% or higher, preferably 90%, 95%, 99% or higher identical thereto.

[0226] As used herein, the term “consensus sequence” refers to the sequence formed from the most frequently occurring amino acids (or nucleotides) in a family of related sequences (See e.g., Winnaker, From Genes to Clones (Verlagsgesellschaft, Weinheim, Germany 1987). In a family of proteins, each position in the consensus sequence is occupied by the amino acid occurring most frequently at that position in the family. If two amino acids occur equally frequently, either can be included in the consensus sequence. A “consensus framework” refers to the framework region in the consensus immunoglobulin sequence.

[0227] An antibody molecule can be humanized by methods known in the art (see e.g., Morrison, S. L., 1985, Science 229:1202-1207, by Oi et al., 1986, BioTechniques 4:214, and by Queen et al. US 5,585,089, US 5,693,761 and US 5,693,762, the contents of all of which are hereby incorporated by reference).

[0228] Humanized or CDR-grafted antibody molecules can be produced by CDR-grafting or CDR substitution, wherein one, two, or all CDRs of an immunoglobulin chain can be replaced. See e.g., U.S. Pat. 5,225,539; Jones et al. 1986 Nature 321:552-525; Verhoeyan et al. 1988 Science 239:1534; Beidler et al. 1988 J. Immunol. 141:4053-4060; Winter US 5,225,539, the contents of all of which are hereby expressly incorporated by reference. Winter describes a CDR-grafting method which may be used to prepare the humanized antibodies of the present invention (UK Patent Application GB 2188638A, filed on Mar. 26, 1987; Winter US 5,225,539), the contents of which is expressly incorporated by reference.

[0229] Also within the scope of the invention are humanized antibody molecules in which specific amino acids have been substituted, deleted or added. Criteria for selecting amino acids from the donor are described in US 5,585,089, e.g., columns 12-16 of US 5,585,089, e.g., columns 12-16 of US 5,585,089, the contents of which are hereby incorporated by reference. Other techniques for humanizing antibodies are described in Padlan et al. EP 519596 A1, published on Dec. 23, 1992.

[0230] The antibody molecule can be a single chain antibody. A single-chain antibody (scFv) may be engineered (see, for example, Colcher, D. et al. (1999) Ann N Y Acad Sci 880:263-80; and Reiter, Y. (1996) Clin Cancer Res 2:245-52). The single chain antibody can be dimerized or multimerized to generate multivalent antibodies having specificities for different epitopes of the same target protein.

[0231] In yet other embodiments, the antibody molecule has a heavy chain constant region chosen from, e.g., the heavy chain constant regions of IgG1, IgG2, IgG3, IgG4, IgM, IgA1, IgA2, IgD, and IgE; particularly, chosen from, e.g., the (e.g., human) heavy chain constant regions of IgG1, IgG2, IgG3, and IgG4. In another embodiment, the antibody molecule has a light chain constant region chosen from, e.g., the (e.g., human) light chain constant regions of kappa or lambda. The constant region can be altered, e.g., mutated, to modify the properties of the antibody (e.g., to increase or decrease one or more of: Fc receptor binding, antibody glycosylation, the number of cysteine residues, effector cell function, and/or complement function). In one embodiment the antibody has: effector function; and can fix complement. In other embodiments the antibody does not; recruit effector cells; or fix complement. In another embodiment, the antibody has reduced or no ability to bind an Fc receptor. For example, it is a isotype or subtype, fragment or other mutant, which does not support binding to an Fc receptor, e.g., it has a mutagenized or deleted Fc receptor binding region.

[0232] Methods for altering an antibody constant region are known in the art. Antibodies with altered function, e.g. altered affinity for an effector ligand, such as FcR on a cell, or the C1 component of complement can be produced by replacing at least one amino acid residue in the constant portion of the antibody with a different residue (see e.g., EP 388,151 A1, U.S. Pat. No. 5,624,821 and U.S. Pat. No. 5,648,260, the contents of all of which are hereby incorporated by reference). Similar type of alterations could be described which if applied to the murine, or other species immunoglobulin would reduce or eliminate these functions.

[0233] An antibody molecule can be derivatized or linked to another functional molecule (e.g., another peptide or protein). As used herein, a “derivatized” antibody molecule is one that has been modified. Methods of derivatization include but are not limited to the addition of a fluorescent moiety, a radionucleotide, a toxin, an enzyme or an affinity ligand such as biotin. Accordingly, the antibody molecules of the invention are intended to include derivatized and otherwise modified forms of the antibodies described herein, including immunoadhesion molecules. For example, an antibody molecule can be functionally linked (by chemical coupling, genetic fusion, noncovalent association or otherwise) to one or more other molecular entities, such as another antibody (e.g., a bispecific antibody or a diabody), a detectable agent, a cytotoxic agent, a pharmaceutical agent, and/or a protein or peptide that can mediate association of the antibody or antibody portion with another molecule (such as a streptavidin core region or a polyhistidine tag).

[0234] One type of derivatized antibody molecule is produced by crosslinking two or more antibodies (of the same type or of different types, e.g., to create bispecific antibodies). Suitable crosslinkers include those that are heterobifunctional, having two distinctly reactive groups separated by an appropriate spacer (e.g., m-maleimidobenzoyl-N-hydroxysuccinimide ester) or homobifunctional (e.g., disuccinimidyl suberate). Such linkers are available from Pierce Chemical Company, Rockford, I11.

### Multispecific or Multifunctional Antibody Molecules

[0235] Exemplary structures of multispecific and multifunctional molecules defined herein are described throughout. Exemplary structures are further described in: Weidle U et al. (2013) The Intriguing Options of Multispecific Antibody Formats for Treatment of Cancer. Cancer Genomics & Proteomics 10: 1-18 (2013); and Spiess C et al. (2015) Alternative molecular formats and therapeutic applications for bispecific antibodies. Molecular Immunology 67: 95-106; the full contents of each of which is incorporated by reference herein).

[0236] In embodiments, multispecific antibody molecules can comprise more than one antigen-binding site, where different sites are specific for different antigens. In embodiments, multispecific antibody molecules can bind more than one (e.g., two or more) epitopes on the same antigen. In embodiments, multispecific antibody molecules comprise an antigen-binding site specific for a target cell (e.g., cancer cell) and a different antigen-binding site specific for an immune effector cell. In one embodiment, the multispecific antibody molecule is a bispecific antibody molecule. Bispecific antibody molecules can be classified into five different structural groups: (i) bispecific immunoglobulin G (BsIgG); (ii) IgG appended with an additional antigen-binding moiety; (iii) bispecific antibody fragments; (iv) bispecific fusion proteins; and (v) bispecific antibody conjugates.

[0237] BsIgG is a format that is monovalent for each antigen. Exemplary BsIgG formats include but are not limited to crossMab, DAF (two-in-one), DAF (four-in-one), DutaMab, DT-IgG, knobs-in-holes common LC, knobs-in-holes assembly, charge pair, Fab-arm exchange, SEEDbody, triomab, LUZ-Y, Fcab, κλ-body, orthogonal Fab. See Spiess et al. Mol. Immunol. 67(2015):95-106. Exemplary BsIgGs include catumaxomab (Fresenius Biotech, Trion Pharma, Neopharm), which contains an anti-CD3 arm and an anti-EpCAM arm; and ertumaxomab (Neovii Biotech, Fresenius Biotech), which targets CD3 and HER2. In some embodiments, BsIgG comprises heavy chains that are engineered for heterodimerization. For example, heavy chains can be engineered for heterodimerization using a “knobs-into-holes” strategy, a SEED platform, a common heavy chain (e.g., in κλ-bodies), and use of heterodimeric Fc regions. See Spiess et al. Mol. Immunol. 67(2015):95-106. Strategies that have been used to avoid heavy chain pairing of homodimers in BsIgG include knobs-in-holes, duobody, azymetric, charge pair, HA-TF, SEEDbody, and differential protein A affinity. See Id. BsIgG can be produced by separate expression of the component antibodies in different host cells and subsequent purification/assembly into a BsIgG. BsIgG can also be produced by expression of the component antibodies in a single host cell. BsIgG can be purified using affinity chromatography, e.g., using protein A and sequential pH elution.

[0238] IgG appended with an additional antigen-binding moiety is another format of bispecific antibody molecules. For example, monospecific IgG can be engineered to have bispecificity by appending an additional antigen-binding unit onto the monospecific IgG, e.g., at the N- or C- terminus of either the heavy or light chain. Exemplary additional antigen-binding units include single domain antibodies (e.g., variable heavy chain or variable light chain), engineered protein scaffolds, and paired antibody variable domains (e.g., single chain variable fragments or variable fragments). See Id. Examples of appended IgG formats include dual variable domain IgG (DVD-Ig), IgG(H)-scFv, scFv-(H)IgG, IgG(L)-scFv, scFv-(L)IgG, IgG(L,H)-Fv, IgG(H)-V, V(H)-IgG, IgG(L)-V, V(L)-IgG, KIH IgG-scFab, 2scFv-IgG, IgG-2scFv, scFv4-Ig, zybody, and DVI-IgG (four-in-one). See Spiess et al. Mol. Immunol. 67(2015):95-106. An example of an IgG-scFv is MM-141 (Merrimack Pharmaceuticals), which binds IGF-1R and HER3. Examples of DVD-Ig include ABT-981 (AbbVie), which binds IL-1α and IL-1β; and ABT-122 (AbbVie), which binds TNF and IL-17A.

[0239] Bispecific antibody fragments (BsAb) are a format of bispecific antibody molecules that lack some or all of the antibody constant domains. For example, some BsAb lack an Fc region. In embodiments, bispecific antibody fragments include heavy and light chain regions that are connected by a peptide linker that permits efficient expression of the BsAb in a single host cell. Exemplary bispecific antibody fragments include but are not limited to nanobody, nanobody-HAS, BiTE, Diabody, DART, TandAb, scDiabody, scDiabody-CH3, Diabody-CH3, triple body, miniantibody, minibody, TriBi minibody, scFv-CH3 KIH, Fab-scFv, scFv-CH-CL-scFv, F(ab′)2, F(ab′)2-scFv2, scFv-KIH, Fab-scFv-Fc, tetravalent HCAb, scDiabody-Fc, Diabody-Fc, tandem scFv-Fc, and intrabody. See Id. For example, the BiTE format comprises tandem scFvs, where the component scFvs bind to CD3 on T cells and a surface antigen on cancer cells

[0240] Bispecific fusion proteins include antibody fragments linked to other proteins, e.g., to add additional specificity and/or functionality. An example of a bispecific fusion protein is an immTAC, which comprises an anti-CD3 scFv linked to an affinity-matured T-cell receptor that recognizes HLA-presented peptides. In embodiments, the dock-and-lock (DNL) method can be used to generate bispecific antibody molecules with higher valency. Also, fusions to albumin binding proteins or human serum albumin can be extend the serum half-life of antibody fragments. See Id.

[0241] In embodiments, chemical conjugation, e.g., chemical conjugation of antibodies and/or antibody fragments, can be used to create BsAb molecules. See Id. An exemplary bispecific antibody conjugate includes the CovX-body format, in which a low molecular weight drug is conjugated site-specifically to a single reactive lysine in each Fab arm or an antibody or fragment thereof. In embodiments, the conjugation improves the serum half-life of the low molecular weight drug. An exemplary CovX-body is CVX-241 (NCT01004822), which comprises an antibody conjugated to two short peptides inhibiting either VEGF or Ang2. See Id.

[0242] The antibody molecules can be produced by recombinant expression, e.g., of at least one or more component, in a host system. Exemplary host systems include eukaryotic cells (e.g., mammalian cells, e.g., CHO cells, or insect cells, e.g., SF9 or S2 cells) and prokaryotic cells (e.g., E. coli). Bispecific antibody molecules can be produced by separate expression of the components in different host cells and subsequent purification/assembly. Alternatively, the antibody molecules can be produced by expression of the components in a single host cell. Purification of bispecific antibody molecules can be performed by various methods such as affinity chromatography, e.g., using protein A and sequential pH elution. In other embodiments, affinity tags can be used for purification, e.g., histidine-containing tag, myc tag, or streptavidin tag.

### CDR-Grafted Scaffolds

[0243] In embodiments, the antibody molecule is a CDR-grafted scaffold domain. In embodiments, the scaffold domain is based on a fibronectin domain, e.g., fibronectin type III domain. The overall fold of the fibronectin type III (Fn3) domain is closely related to that of the smallest functional antibody fragment, the variable domain of the antibody heavy chain. There are three loops at the end of Fn3; the positions of BC, DE and FG loops approximately correspond to those of CDR1, 2 and 3 of the VH domain of an antibody. Fn3 does not have disulfide bonds; and therefore Fn3 is stable under reducing conditions, unlike antibodies and their fragments (see, e.g., WO 98/56915; WO 01/64942; WO 00/34784). An Fn3 domain can be modified (e.g., using CDRs or hypervariable loops described herein) or varied, e.g., to select domains that bind to an antigen/marker/cell described herein.

[0244] In embodiments, a scaffold domain, e.g., a folded domain, is based on an antibody, e.g., a “minibody” scaffold created by deleting three beta strands from a heavy chain variable domain of a monoclonal antibody (see, e.g., Tramontano et al., 1994, J Mol. Recognit. 7:9; and Martin et al., 1994, EMBO J. 13:5303-5309). The “minibody” can be used to present two hypervariable loops. In embodiments, the scaffold domain is a V-like domain (see, e.g., Coia et al. WO 99/45110) or a domain derived from tendamistatin, which is a 74 residue, six-strand beta sheet sandwich held together by two disulfide bonds (see, e.g., McConnell and Hoess, 1995, J Mol. Biol. 250:460). For example, the loops of tendamistatin can be modified (e.g., using CDRs or hypervariable loops) or varied, e.g., to select domains that bind to a marker/antigen/cell described herein. Another exemplary scaffold domain is a beta-sandwich structure derived from the extracellular domain of CTLA-4 (see, e.g., WO 00/60070).

[0245] Other exemplary scaffold domains include but are not limited to T-cell receptors; MHC proteins; extracellular domains (e.g., fibronectin Type III repeats, EGF repeats); protease inhibitors (e.g., Kunitz domains, ecotin, BPTI, and so forth); TPR repeats; trifoil structures; zinc finger domains; DNA-binding proteins; particularly monomeric DNA binding proteins; RNA binding proteins; enzymes, e.g., proteases (particularly inactivated proteases), RNase; chaperones, e.g., thioredoxin, and heat shock proteins; and intracellular signaling domains (such as SH2 and SH3 domains). See, e.g., US 20040009530 and US 7,501,121, incorporated herein by reference.

[0246] In embodiments, a scaffold domain is evaluated and chosen, e.g., by one or more of the following criteria: (1) amino acid sequence, (2) sequences of several homologous domains, (3) 3-dimensional structure, and/or (4) stability data over a range of pH, temperature, salinity, organic solvent, oxidant concentration. In embodiments, the scaffold domain is a small, stable protein domain, e.g., a protein of less than 100, 70, 50, 40 or 30 amino acids. The domain may include one or more disulfide bonds or may chelate a metal, e.g., zinc.

### Antibody-Based Fusions

[0247] A variety of formats can be generated which contain additional binding entities attached to the N or C terminus of antibodies. These fusions with single chain or disulfide stabilized Fvs or Fabs result in the generation of tetravalent molecules with bivalent binding specificity for each antigen. Combinations of scFvs and scFabs with IgGs enable the production of molecules which can recognize three or more different antigens.

### Antibody-Fab Fusion

[0248] Antibody-Fab fusions are bispecific antibodies comprising a traditional antibody to a first target and a Fab to a second target fused to the C terminus of the antibody heavy chain. Commonly the antibody and the Fab will have a common light chain. Antibody fusions can be produced by (1) engineering the DNA sequence of the target fusion, and (2) transfecting the target DNA into a suitable host cell to express the fusion protein. It seems like the antibody-scFv fusion may be linked by a (Gly)-Ser linker between the C-terminus of the CH3 domain and the N-terminus of the scFv, as described by Coloma, J. et al. (1997) Nature Biotech 15:159.

### Antibody-scFv Fusion

[0249] Antibody-scFv Fusions are bispecific antibodies comprising a traditional antibody and a scFv of unique specificity fused to the C terminus of the antibody heavy chain. The scFv can be fused to the C terminus through the Heavy Chain of the scFv either directly or through a linker peptide. Antibody fusions can be produced by (1) engineering the DNA sequence of the target fusion, and (2) transfecting the target DNA into a suitable host cell to express the fusion protein. It seems like the antibody-scFv fusion may be linked by a (Gly)-Ser linker between the C-terminus of the CH3 domain and the N-terminus of the scFv, as described by Coloma, J. et al. (1997) Nature Biotech 15:159.

### Variable Domain Immunoglobulin DVD

[0250] A related format is the dual variable domain immunoglobulin (DVD), which are composed of VH and VL domains of a second specificity place upon the N termini of the V domains by shorter linker sequences.

[0251] Other exemplary multispecific antibody formats include, e.g., those described in the following US20160114057A1, US20130243775A1, US20140051833, US20130022601, US20150017187A1, US20120201746A1, US20150133638A1, US20130266568A1, US20160145340A1, WO2015127158A1, US20150203591A1, US20140322221A1, US20130303396A1, US20110293613, US20130017200A1, US20160102135A1, WO2015197598A2, WO2015197582A1, US9359437, US20150018529, WO2016115274A1, WO2016087416A1, US20080069820A1, US9145588B, US7919257, and US20150232560A1. Exemplary multispecific molecules utilizing a full antibody-Fab/scFab format include those described in the following, US9382323B2, US20140072581A1, US20140308285A1, US20130165638A1, US20130267686A1, US20140377269A1, US7741446B2, and WO1995009917A1. Exemplary multispecific molecules utilizing a domain exchange format include those described in the following, US20150315296A1, WO2016087650A1, US20160075785A1, WO2016016299A1, US20160130347A1, US20150166670, US8703132B2, US20100316645, US8227577B2, US20130078249.

### Fc-Containing Entities (Mini-Antibodies)

[0252] Fc-containing entities, also known as mini-antibodies, can be generated by fusing scFv to the C-termini of constant heavy region domain 3 (CH3-scFv) and/or to the hinge region (scFv-hinge-Fc) of an antibody with a different specificity. Trivalent entities can also be made which have disulfide stabilized variable domains (without peptide linker) fused to the C-terminus of CH3 domains of IgGs.

### Fc-Containing Multispecific Molecules

[0253] In some embodiments, the multispecific molecules disclosed herein includes an immunoglobulin constant region (e.g., an Fc region). Exemplary Fc regions can be chosen from the heavy chain constant regions of IgG1, IgG2, IgG3 or IgG4; more particularly, the heavy chain constant region of human IgG1, IgG2, IgG3, or IgG4.

[0254] In some embodiments, the immunoglobulin chain constant region (e.g., the Fc region) is altered, e.g., mutated, to increase or decrease one or more of: Fc receptor binding, antibody glycosylation, the number of cysteine residues, effector cell function, or complement function.

[0255] In other embodiments, an interface of a first and second immunoglobulin chain constant regions (e.g., a first and a second Fc region) is altered, e.g., mutated, to increase or decrease dimerization, e.g., relative to a non-engineered interface, e.g., a naturally-occurring interface. For example, dimerization of the immunoglobulin chain constant region (e.g., the Fc region) can be enhanced by providing an Fc interface of a first and a second Fc region with one or more of: a paired protuberance-cavity (“knob-in-a hole”), an electrostatic interaction, or a strand-exchange, such that a greater ratio of heteromultimer to homomultimer forms, e.g., relative to a non-engineered interface.

[0256] In some embodiments, the multispecific molecules include a paired amino acid substitution at a position chosen from one or more of 347, 349, 350, 351, 366, 368, 370, 392, 394, 395, 397, 398, 399, 405, 407, or 409, e.g., of the Fc region of human IgG1 For example, the immunoglobulin chain constant region (e.g., Fc region) can include a paired an amino acid substitution chosen from: T366S, L368A, or Y407V (e.g., corresponding to a cavity or hole), and T366W (e.g., corresponding to a protuberance or knob).

[0257] In other embodiments, the multifunctional molecule includes a half-life extender, e.g., a human serum albumin or an antibody molecule to human serum albumin.

### Heterodimerized Antibody Molecules & Methods of Making

[0258] Various methods of producing multispecific antibodies have been disclosed to address the problem of incorrect heavy chain pairing. Exemplary methods are described below. Exemplary multispecific antibody formats and methods of making said multispecific antibodies are also disclosed in e.g., Speiss et al. Molecular Immunology 67 (2015) 95-106; and Klein et al mAbs 4:6, 653-663; November/December 2012; the entire contents of each of which are incorporated by reference herein.

[0259] Heterodimerized bispecific antibodies are based on the natural IgG structure, wherein the two binding arms recognize different antigens. IgG derived formats that enable defined monovalent (and simultaneous) antigen binding are generated by forced heavy chain heterodimerization, combined with technologies that minimize light chain mispairing (e.g., common light chain). Forced heavy chain heterodimerization can be obtained using, e.g., knob-in-hole OR strand exchange engineered domains (SEED).

### Knob-in-Hole

[0260] Knob-in-Hole as described in US 5,731,116, US 7,476,724 and Ridgway, J. et al. (1996) Prot. Engineering 9(7): 617-621, broadly involves: (1) mutating the CH3 domain of one or both antibodies to promote heterodimerization; and (2) combining the mutated antibodies under conditions that promote heterodimerization. “Knobs” or “protuberances” are typically created by replacing a small amino acid in a parental antibody with a larger amino acid (e.g., T366Y or T366W); “Holes” or “cavities” are created by replacing a larger residue in a parental antibody with a smaller amino acid (e.g., Y407T, T366S, L368A and/or Y407V).

[0261] For bispecific antibodies including an Fc domain, introduction of specific mutations into the constant region of the heavy chains to promote the correct heterodimerization of the Fc portion can be utilized. Several such techniques are reviewed in Klein et al. (mAbs (2012) 4:6, 1-11), the contents of which are incorporated herein by reference in their entirety. These techniques include the “knobs-into-holes” (KiH) approach which involves the introduction of a bulky residue into one of the CH3 domains of one of the antibody heavy chains. This bulky residue fits into a complementary “hole” in the other CH3 domain of the paired heavy chain so as to promote correct pairing of heavy chains (see e.g., US7642228).

[0262] Exemplary KiH mutations include S354C, T366W in the “knob” heavy chain and Y349C, T366S, L368A, Y407V in the “hole” heavy chain. Other exemplary KiH mutations are provided in Table 1, with additional optional stabilizing Fc cysteine mutations.

TABLE 1

Exemplary Fc KiH mutations and optional Cysteine mutations

| Position | Knob Mutation | Hole Mutation |
|---|---|---|
| T366 | T366W | T366S |
| L368 | - | L368A |
| Y407 | - | Y407V |
| Additional Cysteine Mutations to form a stabilizing disulfide bridge | | |
| Position | Knob CH3 | Hole CH3 |
| S354 | S354C | - |
| Y349 | - | Y349C |

[0263] Other Fc mutations are provided by Igawa and Tsunoda who identified 3 negatively charged residues in the CH3 domain of one chain that pair with three positively charged residues in the CH3 domain of the other chain. These specific charged residue pairs are: E356-K439, E357-K370, D399-K409 and vice versa. By introducing at least two of the following three mutations in chain A: E356K, E357K and D399K, as well as K370E, K409D, K439E in chain B, alone or in combination with newly identified disulfide bridges, they were able to favor very efficient heterodimerization while suppressing homodimerization at the same time (Martens T et al. A novel one-armed antic- Met antibody inhibits glioblastoma growth in vivo. Clin Cancer Res 2006; 12:6144-52; PMID: 17062691). Xencor defined 41 variant pairs based on combining structural calculations and sequence information that were subsequently screened for maximal heterodimerization, defining the combination of S364H, F405A (HA) on chain A and Y349T, T394F on chain B (TF) (Moore GL et al. A novel bispecific antibody format enables simultaneous bivalent and monovalent co-engagement of distinct target antigens. MAbs 2011; 3:546-57; PMID: 22123055).

[0264] Other exemplary Fc mutations to promote heterodimerization of multispecific antibodies include those described in the following references, the contents of each of which is incorporated by reference herein, WO2016071377A1, US20140079689A1, US20160194389A1, US20160257763, WO2016071376A2, WO2015107026A1, WO2015107025A1, WO2015107015A1, US20150353636A1, US20140199294A1, US7750128B2, US20160229915A1, US20150344570A1, US8003774A1, US20150337049A1, US20150175707A1, US20140242075A1, US20130195849A1, US20120149876A1, US20140200331A1, US9309311B2, US8586713, US20140037621A1, US20130178605A1, US20140363426A1, US20140051835A1 and US20110054151A1.

[0265] Stabilizing cysteine mutations have also been used in combination with KiH and other Fc heterodimerization promoting variants, see e.g., US7183076. Other exemplary cysteine modifications include, e.g., those disclosed in US20140348839A1, US7855275B2, and US9000130B2.

### Strand Exchange Engineered Domains (SEED)

[0266] Heterodimeric Fc platform that support the design of bispecific and asymmetric fusion proteins by devising strand-exchange engineered domain (SEED) C(H)3 heterodimers are known. These derivatives of human IgG and IgA C(H)3 domains create complementary human SEED C(H)3 heterodimers that are composed of alternating segments of human IgA and IgG C(H)3 sequences. The resulting pair of SEED C(H)3 domains preferentially associates to form heterodimers when expressed in mammalian cells. SEEDbody (Sb) fusion proteins consist of [IgG1 hinge]-C(H)2-[SEED C(H)3], that may be genetically linked to one or more fusion partners (see e.g., Davis JH et al. SEEDbodies: fusion proteins based on strand exchange engineered domain (SEED) CH3 heterodimers in an Fc analogue platform for asymmetric binders or immunofusions and bispecific antibodies. Protein Eng Des Sel 2010; 23:195-202; PMID:20299542 and US8871912. The contents of each of which are incorporated by reference herein).

### Duobody

[0267] “Duobody” technology to produce bispecific antibodies with correct heavy chain pairing are known. The DuoBody technology involves three basic steps to generate stable bispecific human IgG1antibodies in a post-production exchange reaction. In a first step, two IgG1s, each containing single matched mutations in the third constant (CH3) domain, are produced separately using standard mammalian recombinant cell lines. Subsequently, these IgG1 antibodies are purified according to standard processes for recovery and purification. After production and purification (post-production), the two antibodies are recombined under tailored laboratory conditions resulting in a bispecific antibody product with a very high yield (typically >95%) (see e.g., Labrijn et al, PNAS 2013;110(13):5145-5150 and Labrijn et al. Nature Protocols 2014;9(10):2450-63, the contents of each of which are incorporated by reference herein).

### Electrostatic Interactions

[0268] Methods of making multispecific antibodies using CH3 amino acid changes with charged amino acids such that homodimer formation is electrostatically unfavorable are disclosed. EP1870459 and WO 2009089004 describe other strategies for favoring heterodimer formation upon co-expression of different antibody domains in a host cell. In these methods, one or more residues that make up the heavy chain constant domain 3 (CH3), CH3—CH3 interfaces in both CH3 domains are replaced with a charged amino acid such that homodimer formation is electrostatically unfavorable and heterodimerization is electrostatically favorable. Additional methods of making multispecific molecules using electrostatic interactions are described in the following references, the contents of each of which is incorporated by reference herein, include US20100015133, US8592562B2, US9200060B2, US20140154254A1, and US9358286A1.

### Common Light Chain

[0269] Light chain mispairing needs to be avoided to generate homogenous preparations of bispecific IgGs. One way to achieve this is through the use of the common light chain principle, i.e. combining two binders that share one light chain but still have separate specificities. An exemplary method of enhancing the formation of a desired bispecific antibody from a mixture of monomers is by providing a common variable light chain to interact with each of the heteromeric variable heavy chain regions of the bispecific antibody. Compositions and methods of producing bispecific antibodies with a common light chain as disclosed in, e.g., US7183076B2, US20110177073A1, EP2847231A1, WO2016079081A1, and EP3055329A1, the contents of each of which is incorporated by reference herein.

### CrossMab

[0270] Another option to reduce light chain mispairing is the CrossMab technology which avoids nonspecific L chain mispairing by exchanging CH1 and CL domains in the Fab of one half of the bispecific antibody. Such crossover variants retain binding specificity and affinity, but make the two arms so different that L chain mispairing is prevented. The CrossMab technology (as reviewed in Klein et al. Supra) involves domain swapping between heavy and light chains so as to promote the formation of the correct pairings. Briefly, to construct a bispecific IgG-like CrossMab antibody that could bind to two antigens by using two distinct light chain-heavy chain pairs, a two-step modification process is applied. First, a dimerization interface is engineered into the C-terminus of each heavy chain using a heterodimerization approach, e.g., Knob-into-hole (KiH) technology, to ensure that only a heterodimer of two distinct heavy chains from one antibody (e.g., Antibody A) and a second antibody (e.g., Antibody B) is efficiently formed. Next, the constant heavy 1 (CH1) and constant light (CL) domains of one antibody are exchanged (Antibody A), keeping the variable heavy (VH) and variable light (VL) domains consistent. The exchange of the CH1 and CL domains ensured that the modified antibody (Antibody A) light chain would only efficiently dimerize with the modified antibody (antibody A) heavy chain, while the unmodified antibody (Antibody B) light chain would only efficiently dimerize with the unmodified antibody (Antibody B) heavy chain; and thus only the desired bispecific CrossMab would be efficiently formed (see e.g., Cain, C. SciBX 4(28); doi:10.1038/scibx.2011.783, the contents of which are incorporated by reference herein).

### Common Heavy Chain

[0271] An exemplary method of enhancing the formation of a desired bispecific antibody from a mixture of monomers is by providing a common variable heavy chain to interact with each of the heteromeric variable light chain regions of the bispecific antibody. Compositions and methods of producing bispecific antibodies with a common heavy chain are disclosed in, e.g., US20120184716, US20130317200, and US20160264685A1, the contents of each of which is incorporated by reference herein.

### Amino Acid Modifications

[0272] Alternative compositions and methods of producing multispecific antibodies with correct light chain pairing include various amino acid modifications. For example, Zymeworks describes heterodimers with one or more amino acid modifications in the CH1 and/or CL domains, one or more amino acid modifications in the VH and/or VL domains, or a combination thereof, which are part of the interface between the light chain and heavy chain and create preferential pairing between each heavy chain and a desired light chain such that when the two heavy chains and two light chains of the heterodimer pair are co-expressed in a cell, the heavy chain of the first heterodimer preferentially pairs with one of the light chains rather than the other (see e.g., WO2015181805). Other exemplary methods are described in WO2016026943 (Argen-X), US20150211001, US20140072581A1, US20160039947A1, and US20150368352.

### Lambda/Kappa Formats

[0273] Multispecific molecules (e.g., multispecific antibody molecules) that include the lambda light chain polypeptide and a kappa light chain polypeptides, can be used to allow for heterodimerization. Methods for generating bispecific antibody molecules comprising the lambda light chain polypeptide and a kappa light chain polypeptides are disclosed in PCT/US17/53053 filed on Sep. 22, 2017, incorporated herein by reference in its entirety.

[0274] In embodiments, the multispecific molecules includes a multispecific antibody molecule, e.g., an antibody molecule comprising two binding specificities, e.g., a bispecific antibody molecule. The multispecific antibody molecule includes:
[0275] a lambda light chain polypeptide 1 (LLCP1) specific for a first epitope;
   [0276] a heavy chain polypeptide 1 (HCP1) specific for the first epitope;
   [0277] a kappa light chain polypeptide 2 (KLCP2) specific for a second epitope; and
   [0278] a heavy chain polypeptide 2 (HCP2) specific for the second epitope.

[0279] “Lambda light chain polypeptide 1 (LLCP1)”, as that term is used herein, refers to a polypeptide comprising sufficient light chain (LC) sequence, such that when combined with a cognate heavy chain variable region, can mediate specific binding to its epitope and complex with an HCP1. In an embodiment it comprises all or a fragment of a CH1 region. In an embodiment, an LLCP1 comprises LC-CDR1, LC-CDR2, LC-CDR3, FR1, FR2, FR3, FR4, and CH1, or sufficient sequence therefrom to mediate specific binding of its epitope and complex with an HCP1. LLCP1, together with its HCP1, provide specificity for a first epitope (while KLCP2, together with its HCP2, provide specificity for a second epitope). As described elsewhere herein, LLCP1 has a higher affinity for HCP1 than for HCP2.

[0280] “Kappa light chain polypeptide 2 (KLCP2)”, as that term is used herein, refers to a polypeptide comprising sufficient light chain (LC) sequence, such that when combined with a cognate heavy chain variable region, can mediate specific binding to its epitope and complex with an HCP2. In an embodiments it comprises all or a fragment of a CH1 region. In an embodiment, a KLCP2 comprises LC-CDR1, LC-CDR2, LC-CDR3, FR1, FR2, FR3, FR4, and CH1, or sufficient sequence therefrom to mediate specific binding of its epitope and complex with an HCP2. KLCP2, together with its HCP2, provide specificity for a second epitope (while LLCP1, together with its HCP1, provide specificity for a first epitope).

[0281] “Heavy chain polypeptide 1 (HCP1)”, as that term is used herein, refers to a polypeptide comprising sufficient heavy chain (HC) sequence, e.g., HC variable region sequence, such that when combined with a cognate LLCP1, can mediate specific binding to its epitope and complex with an HCP1. In an embodiments it comprises all or a fragment of a CH1region. In an embodiment, it comprises all or a fragment of a CH2 and/or CH3 region. In an embodiment an HCP1 comprises HC-CDR1, HC-CDR2, HC-CDR3, FR1, FR2, FR3, FR4, CH1, CH2, and CH3, or sufficient sequence therefrom to: (i) mediate specific binding of its epitope and complex with an LLCP1, (ii) to complex preferentially, as described herein to LLCP1 as opposed to KLCP2; and (iii) to complex preferentially, as described herein, to an HCP2, as opposed to another molecule of HCP1. HCP1, together with its LLCP1, provide specificity for a first epitope (while KLCP2, together with its HCP2, provide specificity for a second epitope).

[0282] “Heavy chain polypeptide 2 (HCP2)”, as that term is used herein, refers to a polypeptide comprising sufficient heavy chain (HC) sequence, e.g., HC variable region sequence, such that when combined with a cognate LLCP1, can mediate specific binding to its epitope and complex with an HCP1. In an embodiments it comprises all or a fragment of a CH1region. In an embodiments it comprises all or a fragment of a CH2 and/or CH3 region. In an embodiment an HCP1 comprises HC-CDR1, HC-CDR2, HC-CDR3, FR1, FR2, FR3, FR4, CH1, CH2, and CH3, or sufficient sequence therefrom to: (i) mediate specific binding of its epitope and complex with an KLCP2, (ii) to complex preferentially, as described herein to KLCP2 as opposed to LLCP1; and (iii) to complex preferentially, as described herein, to an HCP1, as opposed to another molecule of HCP2. HCP2, together with its KLCP2, provide specificity for a second epitope (while LLCP1, together with its HCP1, provide specificity for a first epitope).

[0283] In some embodiments of the multispecific antibody molecule disclosed herein:
[0284] LLCP1 has a higher affinity for HCP1 than for HCP2; and/or
[0285] KLCP2 has a higher affinity for HCP2 than for HCP1.

[0286] In embodiments, the affinity of LLCP1 for HCP1 is sufficiently greater than its affinity for HCP2, such that under preselected conditions, e.g., in aqueous buffer, e.g., at pH 7, in saline, e.g., at pH 7, or under physiological conditions, at least 75, 80, 90, 95, 98, 99, 99.5, or 99.9 % of the multispecific antibody molecule molecules have a LLCP1complexed, or interfaced with, a HCP1.

[0287] In some embodiments of the multispecific antibody molecule disclosed herein:
[0288] the HCP1 has a greater affinity for HCP2, than for a second molecule of HCP1; and/or
[0289] the HCP2 has a greater affinity for HCP1, than for a second molecule of HCP2.

[0290] In embodiments, the affinity of HCP1 for HCP2 is sufficiently greater than its affinity for a second molecule of HCP1, such that under preselected conditions, e.g., in aqueous buffer, e.g., at pH 7, in saline, e.g., at pH 7, or under physiological conditions, at least 75%, 80, 90, 95, 98, 99 99.5 or 99.9 % of the multispecific antibody molecule molecules have a HCP1complexed, or interfaced with, a HCP2.

[0291] In another aspect, disclosed herein is a method for making, or producing, a multispecific antibody molecule. The method includes:
[0292] (i) providing a first heavy chain polypeptide (e.g., a heavy chain polypeptide comprising one, two, three or all of a first heavy chain variable region (first VH), a first CH1, a first heavy chain constant region (e.g., a first CH2, a first CH3, or both));
[0293] (ii) providing a second heavy chain polypeptide (e.g., a heavy chain polypeptide comprising one, two, three or all of a second heavy chain variable region (second VH), a second CH1, a second heavy chain constant region (e.g., a second CH2, a second CH3, or both));
[0294] (iii) providing a lambda chain polypeptide (e.g., a lambda light variable region (VL□), a lambda light constant chain (VL□), or both) that preferentially associates with the first heavy chain polypeptide (e.g., the first VH); and
[0295] (iv) providing a kappa chain polypeptide (e.g., a lambda light variable region (VL□), a lambda light constant chain (VL□), or both) that preferentially associates with the second heavy chain polypeptide (e.g., the second VH),
under conditions where (i)-(iv) associate.

[0296] In embodiments, the first and second heavy chain polypeptides form an Fc interface that enhances heterodimerization.

[0297] In embodiments, (i)-(iv) (e.g., nucleic acid encoding (i)-(iv)) are introduced in a single cell, e.g., a single mammalian cell, e.g., a CHO cell. In embodiments, (i)-(iv) are expressed in the cell.

[0298] In embodiments, (i)-(iv) (e.g., nucleic acid encoding (i)-(iv)) are introduced in different cells, e.g., different mammalian cells, e.g., two or more CHO cell. In embodiments, (i)-(iv) are expressed in the cells.

[0299] In one embodiment, the method further comprises purifying a cell-expressed antibody molecule, e.g., using a lambda- and/or- kappa-specific purification, e.g., affinity chromatography.

[0300] In embodiments, the method further comprises evaluating the cell-expressed multispecific antibody molecule. For example, the purified cell-expressed multispecific antibody molecule can be analyzed by techniques known in the art, include mass spectrometry. In one embodiment, the purified cell-expressed antibody molecule is cleaved, e.g., digested with papain to yield the Fab moieties and evaluated using mass spectrometry.

[0301] In embodiments, the method produces correctly paired kappa/lambda multispecific, e.g., bispecific, antibody molecules in a high yield, e.g., at least 75%, 80, 90, 95, 98, 99 99.5 or 99.9 %.

[0302] In other embodiments, the multispecific, e.g., a bispecific, antibody molecule that includes:
[0303] (i) a first heavy chain polypeptide (HCP1) (e.g., a heavy chain polypeptide comprising one, two, three or all of a first heavy chain variable region (first VH), a first CH1, a first heavy chain constant region (e.g., a first CH2, a first CH3, or both)), e.g., wherein the HCP1 binds to a first epitope;
[0304] (ii) a second heavy chain polypeptide (HCP2) (e.g., a heavy chain polypeptide comprising one, two, three or all of a second heavy chain variable region (second VH), a second CH1, a second heavy chain constant region (e.g., a second CH2, a second CH3, or both)), e.g., wherein the HCP2 binds to a second epitope;
[0305] (iii) a lambda light chain polypeptide (LLCP1) (e.g., a lambda light variable region (VLl), a lambda light constant chain (VLl), or both) that preferentially associates with the first heavy chain polypeptide (e.g., the first VH), e.g., wherein the LLCP1 binds to a first epitope; and
[0306] (iv) a kappa light chain polypeptide (KLCP2) (e.g., a lambda light variable region (VLk), a lambda light constant chain (VLk), or both) that preferentially associates with the second heavy chain polypeptide (e.g., the second VH), e.g., wherein the KLCP2 binds to a second epitope.

[0307] In embodiments, the first and second heavy chain polypeptides form an Fc interface that enhances heterodimerization. In embodiments, the multispecific antibody molecule has a first binding specificity that includes a hybrid VLl-CLl heterodimerized to a first heavy chain variable region connected to the Fc constant, CH2—CH3 domain (having a knob modification) and a second binding specificity that includes a hybrid VLk-CLk heterodimerized to a second heavy chain variable region connected to the Fc constant, CH2—CH3 domain (having a hole modification).

### Linkers

[0308] The multispecific or multifunctional molecule disclosed herein can further include a linker, e.g., a linker between one or more of: the antigen binding domain and the cytokine molecule, the antigen binding domain and the immune cell engager, the antigen binding domain and the stromal modifying moiety, the cytokine molecule and the immune cell engager, the cytokine molecule and the stromal modifying moiety, the immune cell engager and the stromal modifying moiety, the antigen binding domain and the immunoglobulin chain constant region, the cytokine molecule and the immunoglobulin chain constant region, the immune cell engager and the immunoglobulin chain constant region, or the stromal modifying moiety and the immunoglobulin chain constant region. In embodiments, the linker is chosen from: a cleavable linker, a non-cleavable linker, a peptide linker, a flexible linker, a rigid linker, a helical linker, or a non-helical linker, or a combination thereof.

[0309] In one embodiment, the multispecific molecule can include one, two, three or four linkers, e.g., a peptide linker. In one embodiment, the peptide linker includes Gly and Ser. In some embodiments, the peptide linker is selected from GGGGS (SEQ ID NO: 42); GGGGSGGGGS (SEQ ID NO: 43); GGGGSGGGGSGGGGS (SEQ ID NO: 44); and DVPSGPGGGGGSGGGGS (SEQ ID NO: 45). In some embodiments, the peptide linker is a A(EAAAK)nA (SEQ ID NO: 6154) family of linkers (e.g., as described in Protein Eng. (2001) 14 (8): 529-532). These are stiff helical linkers with n ranging from 2 - 5. In some embodiments, the peptide linker is selected from AEAAAKEAAAKAAA (SEQ ID NO: 75); AEAAAKEAAAKEAAAKAAA (SEQ ID NO: 76); AEAAAKEAAAKEAAAKEAAAKAAA (SEQ ID NO: 77); and AEAAAKEAAAKEAAAKEAAAKEAAAKAAA(SEQ ID NO: 78).

### Targeting Moieties

[0310] In one embodiment, the anti-NKp30 antibody molecule further comprises a second antigen binding moiety, e.g., tumor targeting moiety, that binds to a cancer antigen, e.g., a tumor antigen or a stromal antigen. In some embodiments, the cancer antigen is, e.g., a mammalian, e.g., a human, cancer antigen. In other embodiments, the antibody molecule further comprises a second binding moiety that binds to an immune cell antigen, e.g., a mammalian, e.g., a human, immune cell antigen. In other embodiments, the antibody molecule further comprises a second binding moiety that binds to a viral antigen. For example, the antibody molecule binds specifically to an epitope, e.g., linear or conformational epitope, on the cancer antigen, the immune cell antigen.

[0311] In some embodiments, the multispecific (e.g., bi-, tri-, tetra- specific) molecule, includes, e.g., is engineered to contain, one or more tumor specific targeting moieties that direct the molecule to a tumor cell. In certain embodiments, the multispecific molecules disclosed herein include a tumor-targeting moiety. The tumor targeting moiety can be chosen from an antibody molecule (e.g., an antigen binding domain as described herein), a receptor or a receptor fragment, or a ligand or a ligand fragment, or a combination thereof. In some embodiments, the tumor targeting moiety associates with, e.g., binds to, a tumor cell (e.g., a molecule, e.g., antigen, present on the surface of the tumor cell). In certain embodiments, the tumor targeting moiety targets, e.g., directs the multispecific molecules disclosed herein to a cancer (e.g., a cancer or tumor cells). In some embodiments, the cancer is chosen from a hematological cancer, a solid cancer, a metastatic cancer, or a combination thereof.

[0312] In some embodiments, the multispecific molecule, e.g., the tumor-targeting moiety, binds to a solid tumor antigen or a stromal antigen. The solid tumor antigen or stromal antigen can be present on a solid tumor, or a metastatic lesion thereof. In some embodiments, the solid tumor is chosen from one or more of pancreatic (e.g., pancreatic adenocarcinoma), breast, colorectal, lung (e.g., small or non-small cell lung cancer), skin, ovarian, or liver cancer. In one embodiment, the solid tumor is a fibrotic or desmoplastic solid tumor. For example, the solid tumor antigen or stromal antigen can be present on a tumor, e.g., a tumor of a class typified by having one or more of: limited tumor perfusion, compressed blood vessels, or fibrotic tumor interstitium.

[0313] In certain embodiments, the solid tumor antigen is chosen from one or more of: PDL1, CD47, mesothelin, ganglioside 2 (GD2), prostate stem cell antigen (PSCA), prostate specific membrane antigen (PMSA), prostate-specific antigen (PSA), carcinoembryonic antigen (CEA), Ron Kinase, c-Met, Immature laminin receptor, TAG-72, BING-4, Calcium-activated chloride channel 2, Cyclin-B1, 9D7, Ep-CAM, EphA3, Her2/neu, Telomerase, SAP-1, Survivin, NY-ESO-1/LAGE-1, PRAME, SSX-2, Melan-A/MART-1, Gp100/pmel17, Tyrosinase, TRP-1/-2, MC1R, β-catenin, BRCA½, CDK4, CML66, Fibronectin, p53, Ras, TGF-B receptor, AFP, ETA, MAGE, MUC-1, CA-125, BAGE, GAGE, NY-ESO-1, β-catenin, CDK4, CDC27, CD47, α actinin-4, TRP1/gp75, TRP2, gp100, Melan-A/MART1, gangliosides, WT1, EphA3, Epidermal growth factor receptor (EGFR), CD20, MART-2, MART-1, MUC1, MUC2, MUM1, MUM2, MUM3, NA88-1, NPM, OA1, OGT, RCC, RUI1, RUI2, SAGE, TRG, TRP1, TSTA, Folate receptor alpha, L1-CAM, CAIX, EGFRvIII, gpA33, GD3, GM2, VEGFR, Intergrins (Integrin alphaVbeta3, Integrin alpha5Beta1), Carbohydrates (Le), IGF1R, EPHA3, TRAILR1, TRAILR2, or RANKL. In some embodiments, the solid tumor antigen is chosen from: PDL1, Mesothelin, CD47, GD2, PMSA, PSCA, CEA, Ron Kinase, or c-Met. Exemplary amino acid and nucleotide sequences for tumor targeting moieties are disclosed in WO 2017/165464, see e.g., pages 102-108, 172-290, incorporated herein by reference.

[0314] In some embodiments, the anti-NKp30 antibody molecule (e.g., the multispecific antibody molecule) further comprises a targeting moiety, e.g., a binding specificity, that binds to an autoreactive T cell, e.g., an antigen present on the surface of an autoreactive T cell that is associated with the inflammatory or autoimmune disorder.

[0315] In some embodiments, the anti-NKp30 antibody molecule (e.g., the multispecific antibody molecule) further comprises a targeting moiety, e.g., a binding specificity, that binds to an infected cell, e.g., a viral infected cell.

### T Cell Engagers

[0316] In other embodiments, the anti-NKp30 antibody molecule (e.g., the multispecific antibody molecule) further comprises one or more T cell engager that mediate binding to and/or activation of a T cell. Accordingly, in some embodiments, the T cell engager is selected from an antigen binding domain or ligand that binds to (e.g., and in some embodiments activates) one or more of CD3, TCRα, TCRβ, TCRγ, TCRζ, ICOS, CD28, CD27, HVEM, LIGHT, CD40, 4-1BB, OX40, DR3, GITR, CD30, TIM1, SLAM, CD2, or CD226. In other embodiments, the T cell engager is selected from an antigen binding domain or ligand that binds to and does not activate one or more of CD3, TCRα, TCRβ, TCRγ, TCRζ, ICOS, CD28, CD27, HVEM, LIGHT, CD40, 4-1BB, OX40, DR3, GITR, CD30, TIM1, SLAM, CD2, or CD226.

[0317] Exemplary T cell engagers are disclosed in WO 2017/165464, incorporated herein by reference.

### Cytokine Molecules

[0318] In other embodiments, the anti-NKp30 antibody molecule (e.g., the multispecific antibody molecule) further comprises one or more cytokine molecules, e.g., immunomodulatory (e.g., proinflammatory) cytokines and variants, e.g., functional variants, thereof. Accordingly, in some embodiments, the cytokine molecule is an interleukin or a variant, e.g., a functional variant thereof. In some embodiments the interleukin is a proinflammatory interleukin. In some embodiments the interleukin is chosen from interleukin-2 (IL-2), interleukin-12 (IL-12), interleukin-15 (IL-15), interleukin-18 (IL-18), interleukin-21 (IL-21), interleukin-7 (IL-7), or interferon gamma. In some embodiments, the cytokine molecule is a proinflammatory cytokine.

[0319] In certain embodiments, the cytokine is a single chain cytokine. In certain embodiments, the cytokine is a multichain cytokine (e.g., the cytokine comprises 2 or more (e.g., 2) polypeptide chains. An exemplary multichain cytokine is IL-12.

[0320] Examples of useful cytokines include, but are not limited to, GM-CSF, IL-1α, IL-1β, IL-2, IL-3, IL-4, IL-5, IL-6, IL-7, IL-8, IL-10, IL-12, IL-21, IFN-α, IFN-β, IFN-γ, MIP-1α, MIP-1β, TGF-β, TNF-α, and TNFβ. In one embodiment the cytokine of the multispecific or multifunctional polypeptide is a cytokine selected from the group of GM-CSF, IL-2, IL-7, IL-8, IL-10, IL-12, IL-15, IL-21, IFN-α, IFN-γ, MIP-1α, MIP-1β and TGF-β. In one embodiment the cytokine of the i the multispecific or multifunctional polypeptide is a cytokine selected from the group of IL-2, IL-7, IL-10, IL-12, IL-15, IFN-α, and IFN-γ. In certain embodiments the cytokine is mutated to remove N- and/or O-glycosylation sites. Elimination of glycosylation increases homogeneity of the product obtainable in recombinant production.

[0321] In one embodiment, the cytokine of the multispecific or multifunctional polypeptide is IL-2. In a specific embodiment, the IL-2 cytokine can elicit one or more of the cellular responses selected from the group consisting of: proliferation in an activated T lymphocyte cell, differentiation in an activated T lymphocyte cell, cytotoxic T cell (CTL) activity, proliferation in an activated B cell, differentiation in an activated B cell, proliferation in a natural killer (NK) cell, differentiation in a NK cell, cytokine secretion by an activated T cell or an NK cell, and NK/lymphocyte activated killer (LAK) antitumor cytotoxicity. In another particular embodiment the IL-2 cytokine is a mutant IL-2 cytokine having reduced binding affinity to the .alpha.-subunit of the IL-2 receptor. Together with the beta- and gamma-subunits (also known as CD122 and CD132, respectively), the .alpha.-subunit (also known as CD25) forms the heterotrimeric high-affinity IL-2 receptor, while the dimeric receptor consisting only of the β- and γ-subunits is termed the intermediate-affinity IL-2 receptor. As described in PCT patent application number PCT/EP2012/051991, which is incorporated herein by reference in its entirety, a mutant IL-2 polypeptide with reduced binding to the .alpha.-subunit of the IL-2 receptor has a reduced ability to induce IL-2 signaling in regulatory T cells, induces less activation-induced cell death (AICD) in T cells, and has a reduced toxicity profile in vivo, compared to a wild-type IL-2 polypeptide. The use of such an cytokine with reduced toxicity is particularly advantageous in a multispecific or multifunctional polypeptide according to the invention, having a long serum half-life due to the presence of an Fc domain. In one embodiment, the mutant IL-2 cytokine of the multispecific or multifunctional polypeptide according to the invention comprises at least one amino acid mutation that reduces or abolishes the affinity of the mutant IL-2 cytokine to the .alpha.-subunit of the IL-2 receptor (CD25) but preserves the affinity of the mutant IL-2 cytokine to the intermediate-affinity IL-2 receptor (consisting of the β and γ subunits of the IL-2 receptor), compared to the non-mutated IL-2 cytokine. In one embodiment the one or more amino acid mutations are amino acid substitutions. In a specific embodiment, the mutant IL-2 cytokine comprises one, two or three amino acid substitutions at one, two or three position(s) selected from the positions corresponding to residue 42, 45, and 72 of human IL-2. In a more specific embodiment, the mutant IL-2 cytokine comprises three amino acid substitutions at the positions corresponding to residue 42, 45 and 72 of human IL-2. In an even more specific embodiment, the mutant IL-2 cytokine is human IL-2 comprising the amino acid substitutions F42A, Y45A and L72G. In one embodiment the mutant IL-2 cytokine additionally comprises an amino acid mutation at a position corresponding to position 3 of human IL-2, which eliminates the O-glycosylation site of IL-2. Particularly, said additional amino acid mutation is an amino acid substitution replacing a threonine residue by an alanine residue. A particular mutant IL-2 cytokine useful in the invention comprises four amino acid substitutions at positions corresponding to residues 3, 42, 45 and 72 of human IL-2. Specific amino acid substitutions are T3A, F42A, Y45A and L72G. As demonstrated in PCT patent application number PCT/EP2012/051991 and in the appended Examples, said quadruple mutant IL-2 polypeptide (IL-2 qm) exhibits no detectable binding to CD25, reduced ability to induce apoptosis in T cells, reduced ability to induce IL-2 signaling in T.sub.reg cells, and a reduced toxicity profile in vivo. However, it retains ability to activate IL-2 signaling in effector cells, to induce proliferation of effector cells, and to generate IFN-γ as a secondary cytokine by NK cells.

[0322] The IL-2 or mutant IL-2 cytokine according to any of the above embodiments may comprise additional mutations that provide further advantages such as increased expression or stability. For example, the cysteine at position 125 may be replaced with a neutral amino acid such as alanine, to avoid the formation of disulfide-bridged IL-2 dimers. Thus, in certain embodiments the IL-2 or mutant IL-2 cytokine of the multispecific or multifunctional polypeptide according to the invention comprises an additional amino acid mutation at a position corresponding to residue 125 of human IL-2. In one embodiment said additional amino acid mutation is the amino acid substitution C125A.

[0323] Exemplary cytokine molecules are disclosed in WO 2017/165464, see e.g., pages 108-118, 169-172, incorporated herein by reference.

### TGF-β Inhibitor

[0324] In other embodiments, the anti-NKp30 antibody molecule (e.g., the multispecific antibody molecule) further comprises one or more modulators of TGF-β (e.g., a TGF-β inhibitor). In some embodiments, the TGF-β inhibitor binds to and inhibits TGF-β, e.g., reduces the activity of TGF-β. In some embodiments, the TGF-β inhibitor inhibits (e.g., reduces the activity of) TGF-β 1. In some embodiments, the TGF-β inhibitor inhibits (e.g., reduces the activity of) TGF-β 2. In some embodiments, the TGF-β inhibitor inhibits (e.g., reduces the activity of) TGF-β 3. In some embodiments, the TGF-β inhibitor inhibits (e.g., reduces the activity of) TGF-β 1 and TGF-β 3. In some embodiments, the TGF-β inhibitor inhibits (e.g., reduces the activity of) TGF-β 1, TGF-β 2, and TGF-β 3.

[0325] In some embodiments, the TGF-β inhibitor comprises a portion of a TGF-β receptor (e.g., an extracellular domain of a TGF-β receptor) that is capable of inhibiting (e.g., reducing the activity of) TGF-β, or functional fragment or variant thereof. In some embodiments, the TGF-β inhibitor comprises a TGFBR1 polypeptide (e.g., an extracellular domain of TGFBR1 or functional variant thereof). In some embodiments, the TGF-β inhibitor comprises a TGFBR2 polypeptide (e.g., an extracellular domain of TGFBR2 or functional variant thereof). In some embodiments, the TGF-β inhibitor comprises a TGFBR3 polypeptide (e.g., an extracellular domain of TGFBR3 or functional variant thereof). In some embodiments, the TGF-β inhibitor comprises a TGFBR1 polypeptide (e.g., an extracellular domain of TGFBR1 or functional variant thereof) and a TGFBR2 polypeptide (e.g., an extracellular domain of TGFBR2 or functional variant thereof). In some embodiments, the TGF-β inhibitor comprises a TGFBR1 polypeptide (e.g., an extracellular domain of TGFBR1 or functional variant thereof) and a TGFBR3 polypeptide (e.g., an extracellular domain of TGFBR3 or functional variant thereof). In some embodiments, the TGF-β inhibitor comprises a TGFBR2 polypeptide (e.g., an extracellular domain of TGFBR2 or functional variant thereof) and a TGFBR3 polypeptide (e.g., an extracellular domain of TGFBR3 or functional variant thereof).

[0326] Exemplary TGF-β receptor polypeptides that can be used as TGF-β inhibitors have been disclosed in US8993524, US9676863, US8658135, US20150056199, US20070184052, and WO2017037634, all of which are herein incorporated by reference in their entirety.

[0327] In some embodiments, the TGF-β inhibitor comprises an extracellular domain of TGFBR1 or a sequence substantially identical thereto (e.g., a sequence that is at least 80%, 85%, 90%, or 95% identical thereto). In some embodiments, the TGF-β inhibitor comprises an extracellular domain of SEQ ID NO: 3095, or a sequence substantially identical thereto (e.g., a sequence that is at least 80%, 85%, 90%, or 95% identical thereto). In some embodiments, the TGF-β inhibitor comprises an extracellular domain of SEQ ID NO: 3096, or a sequence substantially identical thereto (e.g., a sequence that is at least 80%, 85%, 90%, or 95% identical thereto). In some embodiments, the TGF-β inhibitor comprises an extracellular domain of SEQ ID NO: 3097, or a sequence substantially identical thereto (e.g., a sequence that is at least 80%, 85%, 90%, or 95% identical thereto). In some embodiments, the TGF-β inhibitor comprises the amino acid sequence of SEQ ID NO: 3104, or a sequence substantially identical thereto (e.g., a sequence that is at least 80%, 85%, 90%, or 95% identical thereto). In some embodiments, the TGF-β inhibitor comprises the amino acid sequence of SEQ ID NO: 3105, or a sequence substantially identical thereto (e.g., a sequence that is at least 80%, 85%, 90%, or 95% identical thereto).

[0328] In some embodiments, the TGF-β inhibitor comprises an extracellular domain of TGFBR2 or a sequence substantially identical thereto (e.g., a sequence that is at least 80%, 85%, 90%, or 95% identical thereto). In some embodiments, the TGF-β inhibitor comprises an extracellular domain of SEQ ID NO: 3098, or a sequence substantially identical thereto (e.g., a sequence that is at least 80%, 85%, 90%, or 95% identical thereto). In some embodiments, the TGF-β inhibitor comprises an extracellular domain of SEQ ID NO: 3099, or a sequence substantially identical thereto (e.g., a sequence that is at least 80%, 85%, 90%, or 95% identical thereto). In some embodiments, the TGF-β inhibitor comprises the amino acid sequence of SEQ ID NO: 3100, or a sequence substantially identical thereto (e.g., a sequence that is at least 80%, 85%, 90%, or 95% identical thereto). In some embodiments, the TGF-β inhibitor comprises the amino acid sequence of SEQ ID NO: 3101, or a sequence substantially identical thereto (e.g., a sequence that is at least 80%, 85%, 90%, or 95% identical thereto). In some embodiments, the TGF-β inhibitor comprises the amino acid sequence of SEQ ID NO: 3102, or a sequence substantially identical thereto (e.g., a sequence that is at least 80%, 85%, 90%, or 95% identical thereto). In some embodiments, the TGF-β inhibitor comprises the amino acid sequence of SEQ ID NO: 3103, or a sequence substantially identical thereto (e.g., a sequence that is at least 80%, 85%, 90%, or 95% identical thereto).

[0329] In some embodiments, the TGF-β inhibitor comprises an extracellular domain of TGFBR3 or a sequence substantially identical thereto (e.g., a sequence that is at least 80%, 85%, 90%, or 95% identical thereto). In some embodiments, the TGF-β inhibitor comprises an extracellular domain of SEQ ID NO: 3106, or a sequence substantially identical thereto (e.g., a sequence that is at least 80%, 85%, 90%, or 95% identical thereto). In some embodiments, the TGF-β inhibitor comprises an extracellular domain of SEQ ID NO: 3107, or a sequence substantially identical thereto (e.g., a sequence that is at least 80%, 85%, 90%, or 95% identical thereto). In some embodiments, the TGF-β inhibitor comprises the amino acid sequence of SEQ ID NO: 3108, or a sequence substantially identical thereto (e.g., a sequence that is at least 80%, 85%, 90%, or 95% identical thereto).

[0330] In some embodiments, the TGF-β inhibitor comprises no more than one TGF-β receptor extracellular domain. In some embodiments, the TGF-β inhibitor comprises two or more (e.g., two, three, four, five, or more) TGF-β receptor extracellular domains, linked together, e.g., via a linker.

TABLE 4

Exemplary amino acid sequences of TGF-β polypeptides or TGF-β receptor polypeptides

| | | |
|---|---|---|
| SEQ ID NO | Description | Amino acid sequence |
| SEQ ID NO: 3092 | Immature human TGF-β 1 (P01137-1) | MPPSGLRLLLLLLPLLWLLVLTPGRPAAGLSTCKTIDMELVKRK RIEAIRGQILSKLRLASPPSQGEVPPGPLPEAVLALYNSTRDRVA GESAEPEPEPEADYYAKEVTRVLMVETHNEIYDKFKQSTHSIYM FFNTSELREAVPEPVLLSRAELRLLRLKLKVEQHVELYQKYSNN SWRYLSNRLLAPSDSPEWLSFDVTGVVRQWLSRGGEIEGFRLSA HCSCDSRDNTLQVDINGFTTGRRGDLATIHGMNRPFLLLMATPL ERAQHLQSSRHRRALDTNYCFSSTEKNCCVRQLYIDFRKDLGW KWIHEPKGYHANFCLGPCPYIWSLDTQYSKVLALYNQHNPGAS AAPCCVPQALEPLPIVYYVGRKPKVEQLSNMIVRSCKCS |
| SEQ ID NO: 3117 | Human TGF-β 1 (P01137-1) | LSTCKTIDMELVKRKRIEAIRGQILSKLRLASPPSQGEVPPGPLPE AVLALYNSTRDRVAGESAEPEPEPEADYYAKEVTRVLMVETHN EIYDKFKQSTHSIYMFFNTSELREAVPEPVLLSRAELRLLRLKLK VEQHVELYQKYSNNSWRYLSNRLLAPSDSPEWLSFDVTGVVRQ WLSRGGEIEGFRLSAHCSCDSRDNTLQVDINGFTTGRRGDLATI HGMNRPFLLLMATPLERAQHLQSSRHRRALDTNYCFSSTEKNC CVRQLYIDFRKDLGWKWIHEPKGYHANFCLGPCPYIWSLDTQY SKVLALYNQHNPGASAAPCCVPQALEPLPIVYYVGRKPKVEQL SNMIVRSCKCS |
| SEQ ID NO: 3093 | Immature human TGF-β 2 (P61812-1) | MHYCVLSAFLILHLVTVALSLSTCSTLDMDQFMRKRIEAIRGQIL SKLKLTSPPEDYPEPEEVPPEVISIYNSTRDLLQEKASRRAAACER ERSDEEYYAKEVYKIDMPPFFPSENAIPPTFYRPYFRIVRFDVSA |
| | | MEKNASNLVKAEFRVFRLQNPKARVPEQRIELYQILKSKDLTSP TQRYIDSKVVKTRAEGEWLSFDVTDAVHEWLHHKDRNLGFKIS LHCPCCTFVPSNNYIIPNKSEELEARFAGIDGTSTYTSGDQKTIKS TRKKNSGKTPHLLLMLLPSYRLESQQTNRRKKRALDAAYCFRN VQDNCCLRPLYIDFKRDLGWKWIHEPKGYNANFCAGACPYLW SSDTQHSRVLSLYNTINPEASASPCCVSQDLEPLTILYYIGKTPKI EQLSNMIVKSCKCS |
| SEQ ID NO: 3118 | Human TGF-β 2 (P61812-1) | LSTCSTLDMDQFMRKRIEAIRGQILSKLKLTSPPEDYPEPEEVPPE VISIYNSTRDLLQEKASRRAAACERERSDEEYYAKEVYKIDMPP FFPSENAIPPTFYRPYFRIVRFDVSAMEKNASNLVKAEFRVFRLQ NPKARVPEQRIELYQILKSKDLTSPTQRYIDSKVVKTRAEGEWL SFDVTDAVHEWLHHKDRNLGFKISLHCPCCTFVPSNNYIIPNKSE ELEARFAGIDGTSTYTSGDQKTIKSTRKKNSGKTPHLLLMLLPSY RLESQQTNRRKKRALDAAYCFRNVQDNCCLRPLYIDFKRDLGW KWIHEPKGYNANFCAGACPYLWSSDTQHSRVLSLYNTINPEAS ASPCCVSQDLEPLTILYYIGKTPKIEQLSNMIVKSCKCS |
| SEQ ID NO: 3094 | Immature human TGF-β 3 (P10600-1) | MKMHLQRALVVLALLNFATVSLSLSTCTTLDFGHIKKKRVEAIR GQILSKLRLTSPPEPTVMTHVPYQVLALYNSTRELLEEMHGERE EGCTQENTESEYYAKEIHKFDMIQGLAEHNELAVCPKGITSKVF RFNVSSVEKNRTNLFRAEFRVLRVPNPSSKRNEQRIELFQILRPD EHIAKQRYIGGKNLPTRGTAEWLSFDVTDTVREWLLRRESNLG LEISIHCPCHTFQPNGDILENIHEVMEIKFKGVDNEDDHGRGDLG RLKKQKDHHNPHLILMMIPPHRLDNPGQGGQRKKRALDTNYCF RNLEENCCVRPLYIDFRQDLGWKWVHEPKGYYANFCSGPCPYL RSADTTHSTVLGLYNTLNPEASASPCCVPQDLEPLTILYYVGRTP KVEQLSNMVVKSCKCS |
| SEQ ID NO: 3119 | Human TGF-β 3 (P10600-1) | LSTCTTLDFGHIKKKRVEAIRGQILSKLRLTSPPEPTVMTHVPYQ VLALYNSTRELLEEMHGEREEGCTQENTESEYYAKEIHKFDMIQ GLAEHNELAVCPKGITSKVFRFNVSSVEKNRTNLFRAEFRVLRV PNPSSKRNEQRIELFQILRPDEHIAKQRYIGGKNLPTRGTAEWLS FDVTDTVREWLLRRESNLGLEISIHCPCHTFQPNGDILENIHEVM EIKFKGVDNEDDHGRGDLGRLKKQKDHHNPHLILMMIPPHRLD NPGQGGQRKKRALDTNYCFRNLEENCCVRPLYIDFRQDLGWK WVHEPKGYYANFCSGPCPYLRSADTTHSTVLGLYNTLNPEASA SPCCVPQDLEPLTILYYVGRTPKVEQLSNMVVKSCKCS |
| SEQ ID NO: 3095 | Immature human TGFBR1 isoform 1 (P36897-1) | MEAAVAAPRPRLLLLVLAAAAAAAAALLPGATALQCFCHLCT KDNFTCVTDGLCFVSVTETTDKVIHNSMCIAEIDLIPRDRPFVCA PSSKTGSVTTTYCCNQDHCNKIELPTTVKSSPGLGPVELAAVIAG PVCFVCISLMLMVYICHNRTVIHHRVPNEEDPSLDRPFISEGTTL KDLIYDMTTSGSGSGLPLLVQRTIARTIVLQESIGKGRFGEVWRG KWRGEEVAVKIFSSREERSWFREAEIYQTVMLRHENILGFIAAD NKDNGTWTQLWLVSDYHEHGSLFDYLNRYTVTVEGMIKLALS TASGLAHLHMEIVGTQGKPAIAHRDLKSKNILVKKNGTCCIADL GLAVRHDSATDTIDIAPNHRVGTKRYMAPEVLDDSINMKHFESF KRADIYAMGLVFWEIARRCSIGGIHEDYQLPYYDLVPSDPSVEE MRKVVCEQKLRPNIPNRWQSCEALRVMAKIMRECWYANGAA RLTALRIKKTLSQLSQQEGIKM |
| SEQ ID NO: 3120 | Human TGFBR1 isoform 1 (P36897-1) | LQCFCHLCTKDNFTCVTDGLCFVSVTETTDKVIHNSMCIAEIDLI PRDRPFVCAPSSKTGSVTTTYCCNQDHCNKIELPTTVKSSPGLGP VELAAVIAGPVCFVCISLMLMVYICHNRTVIHHRVPNEEDPSLD RPFISEGTTLKDLIYDMTTSGSGSGLPLLVQRTIARTIVLQESIGK GRFGEVWRGKWRGEEVAVKIFSSREERSWFREAEIYQTVMLRH ENILGFIAADNKDNGTWTQLWLVSDYHEHGSLFDYLNRYTVTV |
| | | EGMIKLALSTASGLAHLHMEIVGTQGKPAIAHRDLKSKNILVKK NGTCCIADLGLAVRHDSATDTIDIAPNHRVGTKRYMAPEVLDD SINMKHFESFKRADIYAMGLVFWEIARRCSIGGIHEDYQLPYYD LVPSDPSVEEMRKVVCEQKLRPNIPNRWQSCEALRVMAKIMRE CWYANGAARLTALRIKKTLSQLSQQEGIKM |
| SEQ ID NO: 3096 | Immature human TGFBR1 isoform 2 (P36897-2) | MEAAVAAPRPRLLLLVLAAAAAAAAALLPGATALQCFCHLCT KDNFTCVTDGLCFVSVTETTDKVIHNSMCIAEIDLIPRDRPFVCA PSSKTGSVTTTYCCNQDHCNKIELPTTGPFSVKSSPGLGPVELAA VIAGPVCFVCISLMLMVYICHNRTVIHHRVPNEEDPSLDRPFISE GTTLKDLIYDMTTSGSGSGLPLLVQRTIARTIVLQESIGKGRFGE VWRGKWRGEEVAVKIFSSREERSWFREAEIYQTVMLRHENILG FIAADNKDNGTWTQLWLVSDYHEHGSLFDYLNRYTVTVEGMI KLALSTASGLAHLHMEIVGTQGKPAIAHRDLKSKNILVKKNGTC CIADLGLAVRHDSATDTIDIAPNHRVGTKRYMAPEVLDDSINMK HFESFKRADIYAMGLVFWEIARRCSIGGIHEDYQLPYYDLVPSD PSVEEMRKVVCEQKLRPNIPNRWQSCEALRVMAKIMRECWYA NGAARLTALRIKKTLSQLSQQEGIKM |
| SEQ ID NO: 3121 | Human TGFBR1 isoform 2 (P36897-2) | LQCFCHLCTKDNFTCVTDGLCFVSVTETTDKVIHNSMCIAEIDLI PRDRPFVCAPSSKTGSVTTTYCCNQDHCNKIELPTTGPFSVKSSP GLGPVELAAVIAGPVCFVCISLMLMVYICHNRTVIHHRVPNEED PSLDRPFISEGTTLKDLIYDMTTSGSGSGLPLLVQRTIARTIVLQE SIGKGRFGEVWRGKWRGEEVAVKIFSSREERSWFREAEIYQTV MLRHENILGFIAADNKDNGTWTQLWLVSDYHEHGSLFDYLNR YTVTVEGMIKLALSTASGLAHLHMEIVGTQGKPAIAHRDLKSK NILVKKNGTCCIADLGLAVRHDSATDTIDIAPNHRVGTKRYMAP EVLDDSINMKHFESFKRADIYAMGLVFWEIARRCSIGGIHEDYQ LPYYDLVPSDPSVEEMRKVVCEQKLRPNIPNRWQSCEALRVMA KIMRECWYANGAARLTALRIKKTLSQLSQQEGIKM |
| SEQ ID NO: 3097 | Immature human TGFBR1 isoform 3 (P36897-3) | MEAAVAAPRPRLLLLVLAAAAAAAAALLPGATALQCFCHLCT KDNFTCVTDGLCFVSVTETTDKVIHNSMCIAEIDLIPRDRPFVCA PSSKTGSVTTTYCCNQDHCNKIELPTTGLPLLVQRTIARTIVLQE SIGKGRFGEVWRGKWRGEEVAVKIFSSREERSWFREAEIYQTV MLRHENILGFIAADNKDNGTWTQLWLVSDYHEHGSLFDYLNR YTVTVEGMIKLALSTASGLAHLHMEIVGTQGKPAIAHRDLKSK NILVKKNGTCCIADLGLAVRHDSATDTIDIAPNHRVGTKRYMAP EVLDDSINMKHFESFKRADIYAMGLVFWEIARRCSIGGIHEDYQ LPYYDLVPSDPSVEEMRKVVCEQKLRPNIPNRWQSCEALRVMA KIMRECWYANGAARLTALRIKKTLSQLSQQEGIKM |
| SEQ ID NO: 3122 | Human TGFBR1 isoform 3 (P36897-3) | LQCFCHLCTKDNFTCVTDGLCFVSVTETTDKVIHNSMCIAEIDLI PRDRPFVCAPSSKTGSVTTTYCCNQDHCNKIELPTTGLPLLVQRT IARTIVLQESIGKGRFGEVWRGKWRGEEVAVKIFSSREERSWFR EAEIYQTVMLRHENILGFIAADNKDNGTWTQLWLVSDYHEHGS LFDYLNRYTVTVEGMIKLALSTASGLAHLHMEIVGTQGKPAIAH RDLKSKNILVKKNGTCCIADLGLAVRHDSATDTIDIAPNHRVGT KRYMAPEVLDDSINMKHFESFKRADIYAMGLVFWEIARRCSIG GIHEDYQLPYYDLVPSDPSVEEMRKVVCEQKLRPNIPNRWQSCE ALRVMAKIMRECWYANGAARLTALRIKKTLSQLSQQEGIKM |
| SEQ ID NO: 3104 | Human TGFBR1 fragment 1 | LQCFCHLCTKDNFTCVTDGLCFVSVTETTDKVIHNSMCIAEIDLI PRDRPFVCAPSSKTGSVTTTYCCNQDHCNKIELPTTVKSSPGLGP VEL |
| SEQ ID NO: 3105 | Human TGFBR1 fragment 2 | ALQCFCHLCTKDNFTCVTDGLCFVSVTETTDKVIHNSMCIAEID LIPRDRPFVCAPSSKTGSVTTTYCCNQDHCNKIEL |
| SEQ ID NO: 3098 | Immature human TGFBR2 isoform B (short isoform) (P37173-1) | MGRGLLRGLWPLHIVLWTRIASTIPPHVQKSVNNDMIVTDNNG AVKFPQLCKFCDVRFSTCDNQKSCMSNCSITSICEKPQEVCVAV WRKNDENITLETVCHDPKLPYHDFILEDAASPKCIMKEKKKPGE TFFMCSCSSDECNDNIIFSEEYNTSNPDLLLVIFQVTGISLLPPLGV AISVIIIFYCYRVNRQQKLSSTWETGKTRKLMEFSEHCAIILEDDR SDISSTCANNINHNTELLPIELDTLVGKGRFAEVYKAKLKQNTSE QFETVAVKIFPYEEYASWKTEKDIFSDINLKHENILQFLTAEERK TELGKQYWLITAFHAKGNLQEYLTRHVISWEDLRKLGSSLARGI AHLHSDHTPCGRPKMPIVHRDLKSSNILVKNDLTCCLCDFGLSL RLDPTLSVDDLANSGQVGTARYMAPEVLESRMNLENVESFKQT DVYSMALVLWEMTSRCNAVGEVKDYEPPFGSKVREHPCVESM KDNVLRDRGRPEIPSFWLNHQGIQMVCETLTECWDHDPEARLT AQCVAERFSELEHLDRLSGRSCSEEKIPEDGSLNTTK |
| SEQ ID NO: 3123 | Human TGFBR2 isoform B (short isoform) (P37173-1) | TIPPHVQKSVNNDMIVTDNNGAVKFPQLCKFCDVRFSTCDNQK SCMSNCSITSICEKPQEVCVAVWRKNDENITLETVCHDPKLPYH DFILEDAASPKCIMKEKKKPGETFFMCSCSSDECNDNIIFSEEYN TSNPDLLLVIFQVTGISLLPPLGVAISVIIIFYCYRVNRQQKLSSTW ETGKTRKLMEFSEHCAIILEDDRSDISSTCANNINHNTELLPIELD TLVGKGRFAEVYKAKLKQNTSEQFETVAVKIFPYEEYASWKTE KDIFSDINLKHENILQFLTAEERKTELGKQYWLITAFHAKGNLQE YLTRHVISWEDLRKLGSSLARGIAHLHSDHTPCGRPKMPIVHRD LKSSNILVKNDLTCCLCDFGLSLRLDPTLSVDDLANSGQVGTAR YMAPEVLESRMNLENVESFKQTDVYSMALVLWEMTSRCNAVG EVKDYEPPFGSKVREHPCVESMKDNVLRDRGRPEIPSFWLNHQ GIQMVCETLTECWDHDPEARLTAQCVAERFSELEHLDRLSGRS CSEEKIPEDGSLNTTK |
| SEQ ID NO: 3099 | Immature human TGFBR2 isoform A (long isoform) (P37173-2) | MGRGLLRGLWPLHIVLWTRIASTIPPHVQKSDVEMEAQKDEIIC PSCNRTAHPLRHINNDMIVTDNNGAVKFPQLCKFCDVRFSTCDN QKSCMSNCSITSICEKPQEVCVAVWRKNDENITLETVCHDPKLP YHDFILEDAASPKCIMKEKKKPGETFFMCSCSSDECNDNIIFSEE YNTSNPDLLLVIFQVTGISLLPPLGVAISVIIIFYCYRVNRQQKLSS TWETGKTRKLMEFSEHCAIILEDDRSDISSTCANNINHNTELLPIE LDTLVGKGRFAEVYKAKLKQNTSEQFETVAVKIFPYEEYASWK TEKDIFSDINLKHENILQFLTAEERKTELGKQYWLITAFHAKGNL QEYLTRHVISWEDLRKLGSSLARGIAHLHSDHTPCGRPKMPIVH RDLKSSNILVKNDLTCCLCDFGLSLRLDPTLSVDDLANSGQVGT ARYMAPEVLESRMNLENVESFKQTDVYSMALVLWEMTSRCNA VGEVKDYEPPFGSKVREHPCVESMKDNVLRDRGRPEIPSFWLN HQGIQMVCETLTECWDHDPEARLTAQCVAERFSELEHLDRLSG RSCSEEKIPEDGSLNTTK |
| SEQ ID NO: 3124 | Human TGFBR2 isoform A (long isoform) (P37173-2) | TIPPHVQKSDVEMEAQKDEIICPSCNRTAHPLRHINNDMIVTDNN GAVKFPQLCKFCDVRFSTCDNQKSCMSNCSITSICEKPQEVCVA VWRKNDENITLETVCHDPKLPYHDFILEDAASPKCIMKEKKKPG ETFFMCSCSSDECNDNIIFSEEYNTSNPDLLLVIFQVTGISLLPPLG VAISVIIIFYCYRVNRQQKLSSTWETGKTRKLMEFSEHCAIILEDD RSDISSTCANNINHNTELLPIELDTLVGKGRFAEVYKAKLKQNTS EQFETVAVKIFPYEEYASWKTEKDIFSDINLKHENILQFLTAEER KTELGKQYWLITAFHAKGNLQEYLTRHVISWEDLRKLGSSLAR GIAHLHSDHTPCGRPKMPIVHRDLKSSNILVKNDLTCCLCDFGL SLRLDPTLSVDDLANSGQVGTARYMAPEVLESRMNLENVESFK QTDVYSMALVLWEMTSRCNAVGEVKDYEPPFGSKVREHPCVE SMKDNVLRDRGRPEIPSFWLNHQGIQMVCETLTECWDHDPEAR LTAQCVAERFSELEHLDRLSGRSCSEEKIPEDGSLNTTK |
| SEQ ID NO: 3100 | Human TGFBR2 fragment 1 (ECD of human TGFBR2 isoform B) | TIPPHVQKSVNNDMIVTDNNGAVKFPQLCKFCDVRFSTCDNQK SCMSNCSITSICEKPQEVCVAVWRKNDENITLETVCHDPKLPYH DFILEDAASPKCIMKEKKKPGETFFMCSCSSDECNDNIIFSEEYN TSNPD |
| SEQ ID NO: 3101 | Human TGFBR2 fragment 2 | IPPHVQKSVNNDMIVTDNNGAVKFPQLCKFCDVRFSTCDNQKS CMSNCSITSICEKPQEVCVAVWRKNDENITLETVCHDPKLPYHD FILEDAASPKCIMKEKKKPGETFFMCSCSSDECNDNIIFSEEYNTS NPD |
| SEQ ID NO: 3102 | Human TGFBR2 fragment 3 (ECD of human TGFBR2 isoform A) | TIPPHVQKSDVEMEAQKDEIICPSCNRTAHPLRHINNDMIVTDNN GAVKFPQLCKFCDVRFSTCDNQKSCMSNCSITSICEKPQEVCVA VWRKNDENITLETVCHDPKLPYHDFILEDAASPKCIMKEKKKPG ETFFMCSCSSDECNDNIIFSEEYNTSNPD |
| SEQ ID NO: 3103 | Human TGFBR2 fragment 4 | QLCKFCDVRFSTCDNQKSCMSNCSITSICEKPQEVCVAVWRKN DENITLETVCHDPKLPYHDFILEDAASPKCIMKEKKKPGETFFM CSCSSDECNDNIIF |
| SEQ ID NO: 3106 | Immature human TGFBR3 isoform 1 (Q03167-1) | MTSHYVIAIFALMSSCLATAGPEPGALCELSPVSASHPVQALME SFTVLSGCASRGTTGLPQEVHVLNLRTAGQGPGQLQREVTLHL NPISSVHIHHKSVVFLLNSPHPLVWHLKTERLATGVSRLFLVSEG SVVQFSSANFSLTAETEERNFPHGNEHLLNWARKEYGAVTSFTE LKIARNIYIKVGEDQVFPPKCNIGKNFLSLNYLAEYLQPKAAEGC VMSSQPQNEEVHIIELITPNSNPYSAFQVDITIDIRPSQEDLEVVK NLILILKCKKSVNWVIKSFDVKGSLKIIAPNSIGFGKESERSMTM TKSIRDDIPSTQGNLVKWALDNGYSPITSYTMAPVANRFHLRLE NNAEEMGDEEVHTIPPELRILLDPGALPALQNPPIRGGEGQNGG LPFPFPDISRRVWNEEGEDGLPRPKDPVIPSIQLFPGLREPEEVQG SVDIALSVKCDNEKMIVAVEKDSFQASGYSGMDVTLLDPTCKA KMNGTHFVLESPLNGCGTRPRWSALDGVVYYNSIVIQVPALGD SSGWPDGYEDLESGDNGFPGDMDEGDASLFTRPEIVVFNCSLQ QVRNPSSFQEQPHGNITFNMELYNTDLFLVPSQGVFSVPENGHV YVEVSVTKAEQELGFAIQTCFISPYSNPDRMSHYTIIENICPKDES VKFYSPKRVHFPIPQADMDKKRFSFVFKPVFNTSLLFLQCELTLC TKMEKHPQKLPKCVPPDEACTSLDASIIWAMMQNKKTFTKPLA VIHHEAESKEKGPSMKEPNPISPPIFHGLDTLTVMGIAFAAFVIGA LLTGALWYIYSHTGETAGRQQVPTSPPASENSSAAHSIGSTQSTP CSSSSTA |
| SEQ ID NO: 3125 | Human TGFBR3 isoform 1 (Q03167-1) | GPEPGALCELSPVSASHPVQALMESFTVLSGCASRGTTGLPQEV HVLNLRTAGQGPGQLQREVTLHLNPISSVHIHHKSVVFLLNSPH PLVWHLKTERLATGVSRLFLVSEGSVVQFSSANFSLTAETEERN FPHGNEHLLNWARKEYGAVTSFTELKIARNIYIKVGEDQVFPPK CNIGKNFLSLNYLAEYLQPKAAEGCVMSSQPQNEEVHIIELITPN SNPYSAFQVDITIDIRPSQEDLEVVKNLILILKCKKSVNWVIKSFD VKGSLKIIAPNSIGFGKESERSMTMTKSIRDDIPSTQGNLVKWAL DNGYSPITSYTMAPVANRFHLRLENNAEEMGDEEVHTIPPELRIL LDPGALPALQNPPIRGGEGQNGGLPFPFPDISRRVWNEEGEDGL PRPKDPVIPSIQLFPGLREPEEVQGSVDIALSVKCDNEKMIVAVE KDSFQASGYSGMDVTLLDPTCKAKMNGTHFVLESPLNGCGTRP RWSALDGVVYYNSIVIQVPALGDSSGWPDGYEDLESGDNGFPG DMDEGDASLFTRPEIVVFNCSLQQVRNPSSFQEQPHGNITFNME LYNTDLFLVPSQGVFSVPENGHVYVEVSVTKAEQELGFAIQTCF ISPYSNPDRMSHYTIIENICPKDESVKFYSPKRVHFPIPQADMDK KRFSFVFKPVFNTSLLFLQCELTLCTKMEKHPQKLPKCVPPDEA |
| | | CTSLDASIIWAMMQNKKTFTKPLAVIHHEAESKEKGPSMKEPNP ISPPIFHGLDTLTVMGIAFAAFVIGALLTGALWYIYSHTGETAGR QQVPTSPPASENSSAAHSIGSTQSTPCSSSSTA |
| SEQ ID NO: 3107 | Immature human TGFBR3 isoform 2 (Q03167-2) | MTSHYVIAIFALMSSCLATAGPEPGALCELSPVSASHPVQALME SFTVLSGCASRGTTGLPQEVHVLNLRTAGQGPGQLQREVTLHL NPISSVHIHHKSVVFLLNSPHPLVWHLKTERLATGVSRLFLVSEG SVVQFSSANFSLTAETEERNFPHGNEHLLNWARKEYGAVTSFTE LKIARNIYIKVGEDQVFPPKCNIGKNFLSLNYLAEYLQPKAAEGC VMSSQPQNEEVHIIELITPNSNPYSAFQVDITIDIRPSQEDLEVVK NLILILKCKKSVNWVIKSFDVKGSLKIIAPNSIGFGKESERSMTM TKSIRDDIPSTQGNLVKWALDNGYSPITSYTMAPVANRFHLRLE NNEEMGDEEVHTIPPELRILLDPGALPALQNPPIRGGEGQNGGLP FPFPDISRRVWNEEGEDGLPRPKDPVIPSIQLFPGLREPEEVQGSV DIALSVKCDNEKMIVAVEKDSFQASGYSGMDVTLLDPTCKAKM NGTHFVLESPLNGCGTRPRWSALDGVVYYNSIVIQVPALGDSSG WPDGYEDLESGDNGFPGDMDEGDASLFTRPEIVVFNCSLQQVR NPSSFQEQPHGNITFNMELYNTDLFLVPSQGVFSVPENGHVYVE VSVTKAEQELGFAIQTCFISPYSNPDRMSHYTIIENICPKDESVKF YSPKRVHFPIPQADMDKKRFSFVFKPVFNTSLLFLQCELTLCTK MEKHPQKLPKCVPPDEACTSLDASIIWAMMQNKKTFTKPLAVI HHEAESKEKGPSMKEPNPISPPIFHGLDTLTVMGIAFAAFVIGAL LTGALWYIYSHTGETAGRQQVPTSPPASENSSAAHSIGSTQSTPC SSSSTA |
| SEQ ID NO: 3126 | Human TGFBR3 isoform 2 (Q03167-2) | GPEPGALCELSPVSASHPVQALMESFTVLSGCASRGTTGLPQEV HVLNLRTAGQGPGQLQREVTLHLNPISSVHIHHKSVVFLLNSPH PLVWHLKTERLATGVSRLFLVSEGSVVQFSSANFSLTAETEERN FPHGNEHLLNWARKEYGAVTSFTELKIARNIYIKVGEDQVFPPK CNIGKNFLSLNYLAEYLQPKAAEGCVMSSQPQNEEVHIIELITPN SNPYSAFQVDITIDIRPSQEDLEVVKNLILILKCKKSVNWVIKSFD VKGSLKIIAPNSIGFGKESERSMTMTKSIRDDIPSTQGNLVKWAL DNGYSPITSYTMAPVANRFHLRLENNEEMGDEEVHTIPPELRILL DPGALPALQNPPIRGGEGQNGGLPFPFPDISRRVWNEEGEDGLP RPKDPVIPSIQLFPGLREPEEVQGSVDIALSVKCDNEKMIVAVEK DSFQASGYSGMDVTLLDPTCKAKMNGTHFVLESPLNGCGTRPR WSALDGVVYYNSIVIQVPALGDSSGWPDGYEDLESGDNGFPGD MDEGDASLFTRPEIVVFNCSLQQVRNPSSFQEQPHGNITFNMEL YNTDLFLVPSQGVFSVPENGHVYVEVSVTKAEQELGFAIQTCFIS PYSNPDRMSHYTIIENICPKDESVKFYSPKRVHFPIPQADMDKKR FSFVFKPVFNTSLLFLQCELTLCTKMEKHPQKLPKCVPPDEACTS LDASIIWAMMQNKKTFTKPLAVIHHEAESKEKGPSMKEPNPISP PIFHGLDTLTVMGIAFAAFVIGALLTGALWYIYSHTGETAGRQQ VPTSPPASENSSAAHSIGSTQSTPCSSSSTA |
| SEQ ID NO: 3108 | Human TGFBR3 fragment 1 | GPEPGALCELSPVSASHPVQALMESFTVLSGCASRGTTGLPQEV HVLNLRTAGQGPGQLQREVTLHLNPISSVHIHHKSVVFLLNSPH PLVWHLKTERLATGVSRLFLVSEGSVVQFSSANFSLTAETEERN FPHGNEHLLNWARKEYGAVTSFTELKIARNIYIKVGEDQVFPPK CNIGKNFLSLNYLAEYLQPKAAEGCVMSSQPQNEEVHIIELITPN SNPYSAFQVDITIDIRPSQEDLEVVKNLILILKCKKSVNWVIKSFD VKGSLKIIAPNSIGFGKESERSMTMTKSIRDDIPSTQGNLVKWAL DNGYSPITSYTMAPVANRFHLRLENNAEEMGDEEVHTIPPELRIL LDPGALPALQNPPIRGGEGQNGGLPFPFPDISRRVWNEEGEDGL PRPKDPVIPSIQLFPGLREPEEVQGSVDIALSVKCDNEKMIVAVE KDSFQASGYSGMDVTLLDPTCKAKMNGTHFVLESPLNGCGTRP |
| | | RWSALDGVVYYNSIVIQVPALGDSSGWPDGYEDLESGDNGFPG DMDEGDASLFTRPEIVVFNCSLQQVRNPSSFQEQPHGNITFNME LYNTDLFLVPSQGVFSVPENGHVYVEVSVTKAEQELGFAIQTCF ISPYSNPDRMSHYTIIENICPKDESVKFYSPKRVHFPIPQADMDK KRFSFVFKPVFNTSLLFLQCELTLCTKMEKHPQKLPKCVPPDEA CTSLDASIIWAMMQNKKTFTKPLAVIHHEAESKEKGPSMKEPNP ISPPIFHGLDTLTV |
| SEQ ID NO: 3192 | hCH1-hFc_Hole-3×4GS-TGFbR2 | ASTKGPSVFPLAPSSKSTSGGTAALGCLVKDYFPEPVTVSWNSG ALTSGVHTFPAVLQSSGLYSLSSVVTVPSSSLGTQTYICNVNHKP SNTKVDKRVEPKSCDKTHTCPPCPAPELLGGPSVFLFPPKPKDTL MISRTPEVTCVVVDVSHEDPEVKFNWYVDGVEVHNAKTKPREE QYNSTYRVVSVLTVLHQDWLNGKEYKCKVSNKALPAPIEKTIS KAKGQPREPQVCTLPPSREEMTKNQVSLSCAVKGFYPSDIAVE WESNGQPENNYKTTPPVLDSDGSFFLVSKLTVDKSRWQQGNVF SCSVMHEALHNHYTQKSLSLSPGXGGGGSGGGGSGGGGSIPPH VQKSVNNDMIVTDNNGAVKFPQLCKFCDVRFSTCDNQKSCMS NCSITSICEKPQEVCVAVWRKNDENITLETVCHDPKLPYHDFILE DAASPKCIMKEKKKPGETFFMCSCSSDECNDNIIFSEEYNTSNPD, wherein X is K or absent |
| SEQ ID NO: 3193 | hCH1-hFc_Knob-3×4GS-TGFbR2 | ASTKGPSVFPLAPSSKSTSGGTAALGCLVKDYFPEPVTVSWNSG ALTSGVHTFPAVLQSSGLYSLSSVVTVPSSSLGTQTYICNVNHKP SNTKVDKRVEPKSCDKTHTCPPCPAPELLGGPSVFLFPPKPKDTL MISRTPEVTCVVVDVSHEDPEVKFNWYVDGVEVHNAKTKPREE QYNSTYRVVSVLTVLHQDWLNGKEYKCKVSNKALPAPIEKTIS KAKGQPREPQVYTLPPCREEMTKNQVSLWCLVKGFYPSDIAVE WESNGQPENNYKTTPPVLDSDGSFFLYSKLTVDKSRWQQGNVF SCSVMHEALHNHYTQKSLSLSPGXGGGGSGGGGSGGGGSIPPH VQKSVNNDMIVTDNNGAVKFPQLCKFCDVRFSTCDNQKSCMS NCSITSICEKPQEVCVAVWRKNDENITLETVCHDPKLPYHDFILE DAASPKCIMKEKKKPGETFFMCSCSSDECNDNIIFSEEYNTSNPD, wherein X is K or absent |
| SEQ ID NO: 3194 | hFc_Hole-3×4GS-TGFbR2 | DKTHTCPPCPAPELLGGPSVFLFPPKPKDTLMISRTPEVTCVVVD VSHEDPEVKFNWYVDGVEVHNAKTKPREEQYNSTYRVVSVLT VLHQDWLNGKEYKCKVSNKALPAPIEKTISKAKGQPREPQVCT LPPSREEMTKNQVSLSCAVKGFYPSDIAVEWESNGQPENNYKTT PPVLDSDGSFFLVSKLTVDKSRWQQGNVFSCSVMHEALHNHYT QKSLSLSPGXGGGGSGGGGSGGGGSIPPHVQKSVNNDMIVTDN NGAVKFPQLCKFCDVRFSTCDNQKSCMSNCSITSICEKPQEVCV AVWRKNDENITLETVCHDPKLPYHDFILEDAASPKCIMKEKKKP GETFFMCSCSSDECNDNIIFSEEYNTSNPD, wherein X is K or absent |
| SEQ ID NO: 3195 | hFc_Knob-3×4GS-TGFbR2 | DKTHTCPPCPAPELLGGPSVFLFPPKPKDTLMISRTPEVTCVVVD VSHEDPEVKFNWYVDGVEVHNAKTKPREEQYNSTYRVVSVLT VLHQDWLNGKEYKCKVSNKALPAPIEKTISKAKGQPREPQVYT LPPCREEMTKNQVSLWCLVKGFYPSDIAVEWESNGQPENNYKT TPPVLDSDGSFFLYSKLTVDKSRWQQGNVFSCSVMHEALHNHY TQKSLSLSPGXGGGGSGGGGSGGGGSIPPHVQKSVNNDMIVTD NNGAVKFPQLCKFCDVRFSTCDNQKSCMSNCSITSICEKPQEVC VAVWRKNDENITLETVCHDPKLPYHDFILEDAASPKCIMKEKK KPGETFFMCSCSSDECNDNIIFSEEYNTSNPD, wherein X is K or absent |
| SEQ ID NO: 3196 | TGFbR2-3×4GS-hCH1-hFc Hole | IPPHVQKSVNNDMIVTDNNGAVKFPQLCKFCDVRFSTCDNQKS CMSNCSITSICEKPQEVCVAVWRKNDENITLETVCHDPKLPYHD |
| | | FILEDAASPKCIMKEKKKPGETFFMCSCSSDECNDNIIFSEEYNTS NPDGGGGSGGGGSGGGGSASTKGPSVFPLAPSSKSTSGGTAALG CLVKDYFPEPVTVSWNSGALTSGVHTFPAVLQSSGLYSLSSVVT VPSSSLGTQTYICNVNHKPSNTKVDKRVEPKSCDKTHTCPPCPA PELLGGPSVFLFPPKPKDTLMISRTPEVTCVVVDVSHEDPEVKFN WYVDGVEVHNAKTKPREEQYNSTYRVVSVLTVLHQDWLNGK EYKCKVSNKALPAPIEKTISKAKGQPREPQVCTLPPSREEMTKN QVSLSCAVKGFYPSDIAVEWESNGQPENNYKTTPPVLDSDGSFF LVSKLTVDKSRWQQGNVFSCSVMHEALHNHYTQKSLSLSPGX, wherein X is K or absent |
| SEQ ID NO: 3197 | TGFbR2-3×4GS-hCH1-hFc_Knob | IPPHVQKSVNNDMIVTDNNGAVKFPQLCKFCDVRFSTCDNQKS CMSNCSITSICEKPQEVCVAVWRKNDENITLETVCHDPKLPYHD FILEDAASPKCIMKEKKKPGETFFMCSCSSDECNDNIIFSEEYNTS NPDGGGGSGGGGSGGGGSASTKGPSVFPLAPSSKSTSGGTAALG CLVKDYFPEPVTVSWNSGALTSGVHTFPAVLQSSGLYSLSSVVT VPSSSLGTQTYICNVNHKPSNTKVDKRVEPKSCDKTHTCPPCPA PELLGGPSVFLFPPKPKDTLMISRTPEVTCVVVDVSHEDPEVKFN WYVDGVEVHNAKTKPREEQYNSTYRVVSVLTVLHQDWLNGK EYKCKVSNKALPAPIEKTISKAKGQPREPQVYTLPPCREEMTKN QVSLWCLVKGFYPSDIAVEWESNGQPENNYKTTPPVLDSDGSFF LYSKLTVDKSRWQQGNVFSCSVMHEALHNHYTQKSLSLSPGX, wherein X is K or absent |
| SEQ ID NO: 3198 | TGFbR2-3×4GS-hCLIg_vl | IPPHVQKSVNNDMIVTDNNGAVKFPQLCKFCDVRFSTCDNQKS CMSNCSITSICEKPQEVCVAVWRKNDENITLETVCHDPKLPYHD FILEDAASPKCIMKEKKKPGETFFMCSCSSDECNDNIIFSEEYNTS NPDGGGGSGGGGSGGGGSGQPKANPTVTLFPPSSEELQANKAT LVCLISDFYPGAVTVAWKADGSPVKAGVETTKPSKQSNNKYAA SSYLSLTPEQWKSHRSYSCQVTHEGSTVEKTVAPTECS |
| SEQ ID NO: 3199 | TGFβR2-3×4GS-hCLIg_vk | IPPHVQKSVNNDMIVTDNNGAVKFPQLCKFCDVRFSTCDNQKS CMSNCSITSICEKPQEVCVAVWRKNDENITLETVCHDPKLPYHD FILEDAASPKCIMKEKKKPGETFFMCSCSSDECNDNIIFSEEYNTS NPDGGGGSGGGGSGGGGSRTVAAPSVFIFPPSDEQLKSGTASVV CLLNNFYPREAKVQWKVDNALQSGNSQESVTEQDSKDSTYSLS STLTLSKADYEKHKVYACEVTHQGLSSPVTKSFNRGEC |

### Stromal Modifying Moieties

[0331] In other embodiments, the anti-NKp30 antibody molecule (e.g., the multispecific antibody molecule) further comprises one or more stromal modifying moieties. Stromal modifying moieties described herein include moieties (e.g., proteins, e.g., enzymes) capable of degrading a component of the stroma, e.g., an ECM component, e.g., a glycosaminoglycan, e.g., hyaluronan (also known as hyaluronic acid or HA), chondroitin sulfate, chondroitin, dermatan sulfate, heparin sulfate, heparin, entactin, tenascin, aggrecan and keratin sulfate; or an extracellular protein, e.g., collagen, laminin, elastin, fibrinogen, fibronectin, and vitronectin.

[0332] In some embodiments, the stromal modifying moiety is an enzyme. For example, the stromal modifying moiety can include, but is not limited to a hyaluronidase, a collagenase, a chondroitinase, a matrix metalloproteinase (e.g., macrophage metalloelastase).

[0333] Exemplary amino acid and nucleotide sequences for stromal modifying moieties are disclosed in WO 2017/165464, see e.g., pages 131-136, 188-193, incorporated herein by reference.

### Nucleic Acids

[0334] Nucleic acids encoding the aforementioned antibody molecules, e.g., multispecific or multifunctional molecules. are also disclosed.

[0335] In certain embodiments, the invention features nucleic acids comprising nucleotide sequences that encode heavy and light chain variable regions and CDRs or hypervariable loops of the antibody molecules, as described herein. For example, the invention features a first and second nucleic acid encoding heavy and light chain variable regions, respectively, of an antibody molecule chosen from one or more of the antibody molecules disclosed herein. The nucleic acid can comprise a nucleotide sequence as set forth in the tables herein, or a sequence substantially identical thereto (e.g., a sequence at least about 85%, 90%, 95%, 99% or more identical thereto, or which differs by no more than 3, 6, 15, 30, or 45 nucleotides from the sequences shown in the tables herein.

[0336] In certain embodiments, the nucleic acid can comprise a nucleotide sequence encoding at least one, two, or three CDRs or hypervariable loops from a heavy chain variable region having an amino acid sequence as set forth in the tables herein, or a sequence substantially homologous thereto (e.g., a sequence at least about 85%, 90%, 95%, 99% or more identical thereto, and/or having one or more substitutions, e.g., conserved substitutions). In other embodiments, the nucleic acid can comprise a nucleotide sequence encoding at least one, two, or three CDRs or hypervariable loops from a light chain variable region having an amino acid sequence as set forth in the tables herein, or a sequence substantially homologous thereto (e.g., a sequence at least about 85%, 90%, 95%, 99% or more identical thereto, and/or having one or more substitutions, e.g., conserved substitutions). In yet another embodiment, the nucleic acid can comprise a nucleotide sequence encoding at least one, two, three, four, five, or six CDRs or hypervariable loops from heavy and light chain variable regions having an amino acid sequence as set forth in the tables herein, or a sequence substantially homologous thereto (e.g., a sequence at least about 85%, 90%, 95%, 99% or more identical thereto, and/or having one or more substitutions, e.g., conserved substitutions).

[0337] In certain embodiments, the nucleic acid can comprise a nucleotide sequence encoding at least one, two, or three CDRs or hypervariable loops from a heavy chain variable region having the nucleotide sequence as set forth in the tables herein, a sequence substantially homologous thereto (e.g., a sequence at least about 85%, 90%, 95%, 99% or more identical thereto, and/or capable of hybridizing under the stringency conditions described herein). In another embodiment, the nucleic acid can comprise a nucleotide sequence encoding at least one, two, or three CDRs or hypervariable loops from a light chain variable region having the nucleotide sequence as set forth in the tables herein, or a sequence substantially homologous thereto (e.g., a sequence at least about 85%, 90%, 95%, 99% or more identical thereto, and/or capable of hybridizing under the stringency conditions described herein). In yet another embodiment, the nucleic acid can comprise a nucleotide sequence encoding at least one, two, three, four, five, or six CDRs or hypervariable loops from heavy and light chain variable regions having the nucleotide sequence as set forth in the tables herein, or a sequence substantially homologous thereto (e.g., a sequence at least about 85%, 90%, 95%, 99% or more identical thereto, and/or capable of hybridizing under the stringency conditions described herein).

[0338] In certain embodiments, the nucleic acid can comprise a nucleotide sequence encoding a cytokine molecule, an immune cell engager, or a stromal modifying moiety disclosed herein.

[0339] In another aspect, the application features host cells and vectors containing the nucleic acids described herein. The nucleic acids may be present in a single vector or separate vectors present in the same host cell or separate host cell, as described in more detail hereinbelow.

### Vectors

[0340] Further provided herein are vectors comprising the nucleotide sequences encoding a multispecific or multifunctional molecule described herein. In one embodiment, the vectors comprise nucleotides encoding a multispecific or multifunctional molecule described herein. In one embodiment, the vectors comprise the nucleotide sequences described herein. The vectors include, but are not limited to, a virus, plasmid, cosmid, lambda phage or a yeast artificial chromosome (YAC).

[0341] Numerous vector systems can be employed. For example, one class of vectors utilizes DNA elements which are derived from animal viruses such as, for example, bovine papilloma virus, polyoma virus, adenovirus, vaccinia virus, baculovirus, retroviruses (Rous Sarcoma Virus, MMTV or MOMLV) or SV40 virus. Another class of vectors utilizes RNA elements derived from RNA viruses such as Semliki Forest virus, Eastern Equine Encephalitis virus and Flaviviruses.

[0342] Additionally, cells which have stably integrated the DNA into their chromosomes may be selected by introducing one or more markers which allow for the selection of transfected host cells. The marker may provide, for example, prototropy to an auxotrophic host, biocide resistance (e.g., antibiotics), or resistance to heavy metals such as copper, or the like. The selectable marker gene can be either directly linked to the DNA sequences to be expressed, or introduced into the same cell by cotransformation. Additional elements may also be needed for optimal synthesis of mRNA. These elements may include splice signals, as well as transcriptional promoters, enhancers, and termination signals.

[0343] Once the expression vector or DNA sequence containing the constructs has been prepared for expression, the expression vectors may be transfected or introduced into an appropriate host cell. Various techniques may be employed to achieve this, such as, for example, protoplast fusion, calcium phosphate precipitation, electroporation, retroviral transduction, viral transfection, gene gun, lipid based transfection or other conventional techniques. In the case of protoplast fusion, the cells are grown in media and screened for the appropriate activity. Methods and conditions for culturing the resulting transfected cells and for recovering the antibody molecule produced are known to those skilled in the art, and may be varied or optimized depending upon the specific expression vector and mammalian host cell employed, based upon the present description.

### Cells

[0344] In another aspect, the application features host cells and vectors containing the nucleic acids described herein. The nucleic acids may be present in a single vector or separate vectors present in the same host cell or separate host cell. The host cell can be a eukaryotic cell, e.g., a mammalian cell, an insect cell, a yeast cell, or a prokaryotic cell, e.g., E. coli. For example, the mammalian cell can be a cultured cell or a cell line. Exemplary mammalian cells include lymphocytic cell lines (e.g., NSO), Chinese hamster ovary cells (CHO), COS cells, oocyte cells, and cells from a transgenic animal, e.g., mammary epithelial cell.

[0345] The invention also provides host cells comprising a nucleic acid encoding an antibody molecule as described herein.

[0346] In one embodiment, the host cells are genetically engineered to comprise nucleic acids encoding the antibody molecule.

[0347] In one embodiment, the host cells are genetically engineered by using an expression cassette. The phrase “expression cassette,” refers to nucleotide sequences, which are capable of affecting expression of a gene in hosts compatible with such sequences. Such cassettes may include a promoter, an open reading frame with or without introns, and a termination signal. Additional factors necessary or helpful in effecting expression may also be used, such as, for example, an inducible promoter.

[0348] The invention also provides host cells comprising the vectors described herein.

[0349] The cell can be, but is not limited to, a eukaryotic cell, a bacterial cell, an insect cell, or a human cell. Suitable eukaryotic cells include, but are not limited to, Vero cells, HeLa cells, COS cells, CHO cells, HEK293 cells, BHK cells and MDCKII cells. Suitable insect cells include, but are not limited to, Sf9 cells.

### Uses

[0350] Methods described herein include treating a disorder, e.g., a cancer, an autoimmune or inflammatory disorder, or an infectious disorder, in a subject by using an anti-NKp30 antibody molecule, e.g., a multispecific molecule, described herein, e.g., using a pharmaceutical composition described herein. Also provided are methods for reducing or ameliorating a symptom of a disorder, e.g., a cancer, an autoimmune or inflammatory disorder, or an infectious disorder, in a subject, as well as methods for inhibiting the growth of a diseased cell, e.g., cancer cell, and/or killing or depleting one or more diseased cells, e.g., cancer cells. In embodiments, the methods described herein decrease the size of a tumor and/or decrease the number of cancer cells in a subject administered with a described herein or a pharmaceutical composition described herein.

[0351] In embodiments, the antibody molecule, e.g., multispecific molecules or pharmaceutical composition, is administered to the subject parenterally. In embodiments, the antibody molecule or pharmaceutical composition is administered to the subject intravenously, subcutaneously, intratumorally, intranodally, intramuscularly, intradermally, or intraperitoneally. In embodiments, the cells are administered, e.g., injected, directly into a tumor or lymph node. In embodiments, the cells are administered as an infusion (e.g., as described in Rosenberg et al., New Eng. J. of Med. 319:1676, 1988) or an intravenous push. In embodiments, the cells are administered as an injectable depot formulation.

[0352] In embodiments, the subject is a mammal. In embodiments, the subject is a human, monkey, pig, dog, cat, cow, sheep, goat, rabbit, rat, or mouse. In embodiments, the subject is a human. In embodiments, the subject is a pediatric subject, e.g., less than 18 years of age, e.g., less than 17, 16, 15, 14, 13, 12, 11, 10, 9, 8, 7, 6, 5, 4, 3, 2, 1 or less years of age. In embodiments, the subject is an adult, e.g., at least 18 years of age, e.g., at least 19, 20, 21, 22, 23, 24, 25, 25-30, 30-35, 35-40, 40-50, 50-60, 60-70, 70-80, or 80-90 years of age.

### Cancers

[0353] In embodiments, the cancer is a hematological cancer, a solid tumor or a metastatic lesion thereof. In some embodiments, the anti-NKp30 antibody molecule used to treat the cancer further comprises a tumor targeting moiety, e.g., a tumor targeting moiety as described herein.

[0354] In embodiments, the hematological cancer is a leukemia or a lymphoma. As used herein, a “hematologic cancer” refers to a tumor of the hematopoietic or lymphoid tissues, e.g., a tumor that affects blood, bone marrow, or lymph nodes. Exemplary hematologic malignancies include, but are not limited to, leukemia (e.g., acute lymphoblastic leukemia (ALL), acute myeloid leukemia (AML), chronic lymphocytic leukemia (CLL), chronic myelogenous leukemia (CML), hairy cell leukemia, acute monocytic leukemia (AMoL), chronic myelomonocytic leukemia (CMML), juvenile myelomonocytic leukemia (JMML), or large granular lymphocytic leukemia), lymphoma (e.g., AIDS-related lymphoma, cutaneous T-cell lymphoma, Hodgkin lymphoma (e.g., classical Hodgkin lymphoma or nodular lymphocyte-predominant Hodgkin lymphoma), mycosis fungoides, non-Hodgkin lymphoma (e.g., B-cell non-Hodgkin lymphoma (e.g., Burkitt lymphoma, small lymphocytic lymphoma (CLL/SLL), diffuse large B-cell lymphoma, follicular lymphoma, immunoblastic large cell lymphoma, precursor B-lymphoblastic lymphoma, or mantle cell lymphoma) or T-cell non-Hodgkin lymphoma (mycosis fungoides, anaplastic large cell lymphoma, or precursor T-lymphoblastic lymphoma)), primary central nervous system lymphoma, Sézary syndrome, Waldenström macroglobulinemia), chronic myeloproliferative neoplasm, Langerhans cell histiocytosis, multiple myeloma/plasma cell neoplasm, myelodysplastic syndrome, or myelodysplastic/myeloproliferative neoplasm.

[0355] In embodiments, the cancer is a solid cancer. Exemplary solid cancers include, but are not limited to, ovarian cancer, rectal cancer, stomach cancer, testicular cancer, cancer of the anal region, uterine cancer, colon cancer, rectal cancer, renal-cell carcinoma, liver cancer, non-small cell carcinoma of the lung, cancer of the small intestine, cancer of the esophagus, melanoma, Kaposi’s sarcoma, cancer of the endocrine system, cancer of the thyroid gland, cancer of the parathyroid gland, cancer of the adrenal gland, bone cancer, pancreatic cancer, skin cancer, cancer of the head or neck, cutaneous or intraocular malignant melanoma, uterine cancer, brain stem glioma, pituitary adenoma, epidermoid cancer, carcinoma of the cervix squamous cell cancer, carcinoma of the fallopian tubes, carcinoma of the endometrium, carcinoma of the vagina, sarcoma of soft tissue, cancer of the urethra, carcinoma of the vulva, cancer of the penis, cancer of the bladder, cancer of the kidney or ureter, carcinoma of the renal pelvis, spinal axis tumor, neoplasm of the central nervous system (CNS), primary CNS lymphoma, tumor angiogenesis, metastatic lesions of said cancers, or combinations thereof.

[0356] In certain embodiments, the cancer is an epithelial, mesenchymal or hematologic malignancy. In certain embodiments, the cancer treated is a solid tumor (e.g., carcinoid, carcinoma or sarcoma), a soft tissue tumor (e.g., a heme malignancy), and a metastatic lesion, e.g., a metastatic lesion of any of the cancers disclosed herein. In one embodiment, the cancer treated is a fibrotic or desmoplastic solid tumor, e.g., a tumor having one or more of: limited tumor perfusion, compressed blood vessels, fibrotic tumor interstitium, or increased interstitial fluid pressure. In one embodiment, the solid tumor is chosen from one or more of pancreatic (e.g., pancreatic adenocarcinoma or pancreatic ductal adenocarcinoma), breast, colon, colorectal, lung (e.g., small cell lung cancer (SCLC) or non-small cell lung cancer (NSCLC)), skin, ovarian, liver cancer, esophageal cancer, endometrial cancer, gastric cancer, head and neck cancer, kidney, or prostate cancer.

[0357] Examples of cancer include, but are not limited to, carcinoma, lymphoma, blastoma, sarcoma, and leukemia or lymphoid malignancies. More particular examples of such cancers are noted below and include: squamous cell cancer (e.g. epithelial squamous cell cancer), lung cancer including small-cell lung cancer, non-small cell lung cancer, adenocarcinoma of the lung and squamous carcinoma of the lung, cancer of the peritoneum, hepatocellular cancer, gastric or stomach cancer including gastrointestinal cancer, pancreatic cancer, glioblastoma, cervical cancer, ovarian cancer, liver cancer, bladder cancer, hepatoma, breast cancer, colon cancer, rectal cancer, colorectal cancer, endometrial cancer or uterine carcinoma, salivary gland carcinoma, kidney or renal cancer, prostate cancer, vulval cancer, thyroid cancer, hepatic carcinoma, anal carcinoma, penile carcinoma, as well as head and neck cancer. The term “cancer” includes primary malignant cells or tumors (e.g., those whose cells have not migrated to sites in the subject’s body other than the site of the original malignancy or tumor) and secondary malignant cells or tumors (e.g., those arising from metastasis, the migration of malignant cells or tumor cells to secondary sites that are different from the site of the original tumor).

[0358] Other examples of cancers or malignancies include, but are not limited to: Acute Childhood Lymphoblastic Leukemia, Acute Lymphoblastic Leukemia, Acute Lymphocytic Leukemia, Acute Myeloid Leukemia, Adrenocortical Carcinoma, Adult (Primary) Hepatocellular Cancer, Adult (Primary) Liver Cancer, Adult Acute Lymphocytic Leukemia, Adult Acute Myeloid Leukemia, Adult Hodgkin’s Disease, Adult Hodgkin’s Lymphoma, Adult Lymphocytic Leukemia, Adult Non-Hodgkin’s Lymphoma, Adult Primary Liver Cancer, Adult Soft Tissue Sarcoma, AIDS-Related Lymphoma, AIDS-Related Malignancies, Anal Cancer, Astrocytoma, Bile Duct Cancer, Bladder Cancer, Bone Cancer, Brain Stem Glioma, Brain Tumors, Breast Cancer, Cancer of the Renal Pelvis and Ureter, Central Nervous System (Primary) Lymphoma, Central Nervous System Lymphoma, Cerebellar Astrocytoma, Cerebral Astrocytoma, Cervical Cancer, Childhood (Primary) Hepatocellular Cancer, Childhood (Primary) Liver Cancer, Childhood Acute Lymphoblastic Leukemia, Childhood Acute Myeloid Leukemia, Childhood Brain Stem Glioma, Childhood Cerebellar Astrocytoma, Childhood Cerebral Astrocytoma, Childhood Extracranial Germ Cell Tumors, Childhood Hodgkin’s Disease, Childhood Hodgkin’s Lymphoma, Childhood Hypothalamic and Visual Pathway Glioma, Childhood Lymphoblastic Leukemia, Childhood Medulloblastoma, Childhood Non-Hodgkin’s Lymphoma, Childhood Pineal and Supratentorial Primitive Neuroectodermal Tumors, Childhood Primary Liver Cancer, Childhood Rhabdomyosarcoma, Childhood Soft Tissue Sarcoma, Childhood Visual Pathway and Hypothalamic Glioma, Chronic Lymphocytic Leukemia, Chronic Myelogenous Leukemia, Colon Cancer, Cutaneous T-Cell Lymphoma, Endocrine Pancreas Islet Cell Carcinoma, Endometrial Cancer, Ependymoma, Epithelial Cancer, Esophageal Cancer, Ewing’s Sarcoma and Related Tumors, Exocrine Pancreatic Cancer, Extracranial Germ Cell Tumor, Extragonadal Germ Cell Tumor, Extrahepatic Bile Duct Cancer, Eye Cancer, Female Breast Cancer, Gaucher’s Disease, Gallbladder Cancer, Gastric Cancer, Gastrointestinal Carcinoid Tumor, Gastrointestinal Tumors, Germ Cell Tumors, Gestational Trophoblastic Tumor, Hairy Cell Leukemia, Head and Neck Cancer, Hepatocellular Cancer, Hodgkin’s Disease, Hodgkin’s Lymphoma, Hypergammaglobulinemia, Hypopharyngeal Cancer, Intestinal Cancers, Intraocular Melanoma, Islet Cell Carcinoma, Islet Cell Pancreatic Cancer, Kaposi’s Sarcoma, Kidney Cancer, Laryngeal Cancer, Lip and Oral Cavity Cancer, Liver Cancer, Lung Cancer, Lymphoproliferative Disorders, Macroglobulinemia, Male Breast Cancer, Malignant Mesothelioma, Malignant Thymoma, Medulloblastoma, Melanoma, Mesothelioma, Metastatic Occult Primary Squamous Neck Cancer, Metastatic Primary Squamous Neck Cancer, Metastatic Squamous Neck Cancer, Multiple Myeloma, Multiple Myeloma/Plasma Cell Neoplasm, Myelodysplastic Syndrome, Myelogenous Leukemia, Myeloid Leukemia, Myeloproliferative Disorders, Nasal Cavity and Paranasal Sinus Cancer, Nasopharyngeal Cancer, Neuroblastoma, Non-Hodgkin’s Lymphoma During Pregnancy, Nonmelanoma Skin Cancer, Non-Small Cell Lung Cancer, Occult Primary Metastatic Squamous Neck Cancer, Oropharyngeal Cancer, Osteo-/Malignant Fibrous Sarcoma, Osteosarcoma/Malignant Fibrous Histiocytoma, Osteosarcoma/Malignant Fibrous Histiocytoma of Bone, Ovarian Epithelial Cancer, Ovarian Germ Cell Tumor, Ovarian Low Malignant Potential Tumor, Pancreatic Cancer, Paraproteinemias, Purpura, Parathyroid Cancer, Penile Cancer, Pheochromocytoma, Pituitary Tumor, Plasma Cell Neoplasm/Multiple Myeloma, Primary Central Nervous System Lymphoma, Primary Liver Cancer, Prostate Cancer, Rectal Cancer, Renal Cell Cancer, Renal Pelvis and Ureter Cancer, Retinoblastoma, Rhabdomyosarcoma, Salivary Gland Cancer, Sarcoidosis Sarcomas, Sezary Syndrome, Skin Cancer, Small Cell Lung Cancer, Small Intestine Cancer, Soft Tissue Sarcoma, Squamous Neck Cancer, Stomach Cancer, Supratentorial Primitive Neuroectodermal and Pineal Tumors, T-Cell Lymphoma, Testicular Cancer, Thymoma, Thyroid Cancer, Transitional Cell Cancer of the Renal Pelvis and Ureter, Transitional Renal Pelvis and Ureter Cancer, Trophoblastic Tumors, Ureter and Renal Pelvis Cell Cancer, Urethral Cancer, Uterine Cancer, Uterine Sarcoma, Vaginal Cancer, Visual Pathway and Hypothalamic Glioma, Vulvar Cancer, Waldenstrom’s Macroglobulinemia, Wilms’ Tumor, and any other hyperproliferative disease, besides neoplasia, located in an organ system listed above.

[0359] In other embodiments, the multispecific molecule, as described above and herein, is used to treat a hyperproliferative disorder, e.g., a hyperproliferative connective tissue disorder (e.g., a hyperproliferative fibrotic disease). In one embodiment, the hyperproliferative fibrotic disease is multisystemic or organ-specific. Exemplary hyperproliferative fibrotic diseases include, but are not limited to, multisystemic (e.g., systemic sclerosis, multifocal fibrosclerosis, sclerodermatous graft-versus-host disease in bone marrow transplant recipients, nephrogenic systemic fibrosis, scleroderma), and organ-specific disorders (e.g., fibrosis of the eye, lung, liver, heart, kidney, pancreas, skin and other organs). In other embodiments, the disorder is chosen from liver cirrhosis or tuberculosis. In other embodiments, the disorder is leprosy.

[0360] In embodiments, the multispecific molecules (or pharmaceutical composition) are administered in a manner appropriate to the disease to be treated or prevented. The quantity and frequency of administration will be determined by such factors as the condition of the patient, and the type and severity of the patient’s disease. Appropriate dosages may be determined by clinical trials. For example, when “an effective amount” or “a therapeutic amount” is indicated, the precise amount of the pharmaceutical composition (or multispecific molecules) to be administered can be determined by a physician with consideration of individual differences in tumor size, extent of infection or metastasis, age, weight, and condition of the subject. In embodiments, the pharmaceutical composition described herein can be administered at a dosage of 10⁴ to 10⁹ cells/kg body weight, e.g., 10⁵ to 10⁶ cells/kg body weight, including all integer values within those ranges. In embodiments, the pharmaceutical composition described herein can be administered multiple times at these dosages. In embodiments, the pharmaceutical composition described herein can be administered using infusion techniques described in immunotherapy (see, e.g., Rosenberg et al., New Eng. J. of Med. 319:1676, 1988).

[0361] In embodiments, the cancer is a myeloproliferative neoplasm, e.g., primary or idiopathic myelofibrosis (MF), essential thrombocytosis (ET), polycythemia vera (PV), or chronic myelogenous leukemia (CML). In embodiments, the cancer is myelofibrosis. In embodiments, the subject has myelofibrosis. In embodiments, the subject has a calreticulin mutation, e.g., a calreticulin mutation disclosed herein. In embodiments, the subject does not have the JAK2-V617F mutation. In embodiments, the subject has the JAK2-V617F mutation. In embodiments, the subject has a MPL mutation. In embodiments, the subject does not have a MPL mutation.

[0362] In embodiments, the cancer is a solid cancer. Exemplary solid cancers include, but are not limited to, ovarian cancer, rectal cancer, stomach cancer, testicular cancer, cancer of the anal region, uterine cancer, colon cancer, rectal cancer, renal-cell carcinoma, liver cancer, non-small cell carcinoma of the lung, cancer of the small intestine, cancer of the esophagus, melanoma, Kaposi’s sarcoma, cancer of the endocrine system, cancer of the thyroid gland, cancer of the parathyroid gland, cancer of the adrenal gland, bone cancer, pancreatic cancer, skin cancer, cancer of the head or neck, cutaneous or intraocular malignant melanoma, uterine cancer, brain stem glioma, pituitary adenoma, epidermoid cancer, carcinoma of the cervix squamous cell cancer, carcinoma of the fallopian tubes, carcinoma of the endometrium, carcinoma of the vagina, sarcoma of soft tissue, cancer of the urethra, carcinoma of the vulva, cancer of the penis, cancer of the bladder, cancer of the kidney or ureter, carcinoma of the renal pelvis, spinal axis tumor, neoplasm of the central nervous system (CNS), primary CNS lymphoma, tumor angiogenesis, metastatic lesions of said cancers, or combinations thereof.

### Inflammatory and Autoimmune Disorders

[0363] In some embodiments, the anti-NKp30 antibody molecules, e.g., the multispecific antibody molecules, disclosed herein can be used to treat inflammatory and autoimmune diseases, and graft vs. host disease (GvHD). In some embodiments, the antibody molecules, e.g., the multispecific antibody molecules, disclosed herein deplete autoreactive T cells, e.g., by directing an NK cell, e.g., an NKp30-expressing cell, to an autoreactive T cell. In some embodiments, the anti-NKp30 antibody molecule further comprises a binding specificity that binds to an autoreactive T cell, e.g., an antigen present on the surface of an autoreactive T cell that is associated with the inflammatory or autoimmune disorder.

[0364] As used herein, the term “autoimmune” disease, disorder, or condition refers to a disease where the body’s immune system attacks its own cells or tissues. An autoimmune disease can result in the production of autoantibodies that are inappropriately produced and/or excessively produced to a self-antigen or autoantigen. Autoimmune diseases include, but are not limited to, cardiovascular diseases, rheumatoid diseases, glandular diseases, gastrointestinal diseases, cutaneous diseases, hepatic diseases, neurological diseases, muscular diseases, nephric diseases, diseases related to reproduction, connective tissue diseases and systemic diseases. In some embodiments, the autoimmune disease is mediated by T cells, B cells, innate immune cells (e.g., macrophages, eosinophils, or natural killer cells), or complement-mediated pathways.

[0365] Examples of autoimmune disorders that may be treated by administering the antibodies of the present invention include, but are not limited to, alopecia greata, ankylosing spondylitis, antiphospholipid syndrome, autoimmune Addison’s disease, autoimmune diseases of the adrenal gland, autoimmune hemolytic anemia, autoimmune hepatitis, autoimmune oophoritis and orchitis, autoimmune thrombocytopenia, Behcet’s disease, bullous pemphigoid, cardiomyopathy, celiac sprue-dermatitis, chronic fatigue immune dysfunction syndrome (CFIDS), chronic inflammatory demyelinating polyneuropathy, Churg-Strauss syndrome, cicatrical pemphigoid, CREST syndrome, cold agglutinin disease, Crohn’s disease, discoid lupus, essential mixed cryoglobulinemia, fibromyalgia-fibromyositis, glomerulonephritis, Graves’ disease, Guillain-Barre, Hashimoto’s thyroiditis, idiopathic pulmonary fibrosis, idiopathic thrombocytopenia purpura (ITP), IgA neuropathy, juvenile arthritis, lichen planus, lupus erthematosus, Meniere’s disease, mixed connective tissue disease, multiple sclerosis, Neuromyelitis optica (NMO), type 1 or immune-mediated diabetes mellitus, myasthenia gravis, pemphigus vulgaris, pernicious anemia, polyarteritis nodosa, polychrondritis, polyglandular syndromes, polymyalgia rheumatica, polymyositis and dermatomyositis, primary agammaglobulinemia, primary biliary cirrhosis, psoriasis, psoriatic arthritis, Raynauld’s phenomenon, Reiter’s syndrome, Rheumatoid arthritis, sarcoidosis, scleroderma, Sjogren’s syndrome, stiff-man syndrome, systemic lupus erythematosus, lupus erythematosus, takayasu arteritis, temporal arteristis/giant cell arteritis, transverse myelitis, ulcerative colitis, uveitis, vasculitides such as dermatitis herpetiformis vasculitis, vitiligo, and Wegener’s granulomatosis. In some embodiments, the autoimmune disorder is SLE or Type-1 diabetes.

[0366] Examples of inflammatory disorders which can be prevented, treated or managed in accordance with the methods of the invention include, but are not limited to, asthma, encephilitis, inflammatory bowel disease, chronic obstructive pulmonary disease (COPD), allergic disorders, septic shock, pulmonary fibrosis, undifferentiated spondyloarthropathy, undifferentiated arthropathy, arthritis, inflammatory osteolysis, and chronic inflammation resulting from chronic viral or bacterial infections.

[0367] Thus, the anti- NKp30 antibody molecules, e.g., multispecific molecules, of the present invention have utility in the treatment of inflammatory and autoimmune diseases.

### Infectious Diseases

[0368] In some embodiments, the anti-NKp30 antibody molecules, e.g., the multispecific antibody molecules, disclosed herein can be used to treat infectious diseases. In some embodiments, the antibody molecules, e.g., the multispecific antibody molecules, disclosed herein deplete cells expressing a viral or bacterial antigen. In some embodiments, the anti-NKp30 antibody molecule further comprises a binding specificity that binds to an antigen present on the surface of an infected cell, e.g., a viral infected cell.

[0369] Some examples of pathogenic viruses causing infections treatable by methods include HIV, hepatitis (A, B, or C), herpes virus (e.g., VZV, HSV-1, HAV-6, HSV-II, and CMV, Epstein Barr virus), adenovirus, influenza virus, flaviviruses, echovirus, rhinovirus, coxsackie virus, cornovirus, respiratory syncytial virus, mumps virus, rotavirus, measles virus, rubella virus, parvovirus, vaccinia virus, HTLV virus, dengue virus, papillomavirus, molluscum virus, poliovirus, rabies virus, JC virus and arboviral encephalitis virus. In one embodiment, the infection is an influenza infection.

[0370] In another embodiment, the infection is a hepatitis infection, e.g., a Hepatitis B or C infection.

[0371] Exemplary viral disorders that can be treated include, but are not limited to, Epstein Bar Virus (EBV), influenza virus, HIV, SIV, tuberculosis, malaria and HCMV.

[0372] Some examples of pathogenic bacteria causing infections treatable by methods of the invention include syphilis, chlamydia, rickettsial bacteria, mycobacteria, staphylococci, streptococci, pneumonococci, meningococci and conococci, klebsiella, proteus, serratia, pseudomonas, legionella, diphtheria, salmonella, bacilli, cholera, tetanus, botulism, anthrax, plague, leptospirosis, and Lymes disease bacteria. The anti-NKp30 antibody molecules can be used in combination with existing treatment modalities for the aforesaid infections. For example, Treatments for syphilis include penicillin (e.g., penicillin G.), tetracycline, doxycycline, ceftriaxone and azithromycin.

### Diagnostic Uses

[0373] In one aspect, the present invention provides a diagnostic method for detecting the presence of a NKp30 protein in vitro (e.g., in a biological sample, such as a tissue biopsy, e.g., from a cancerous tissue) or in vivo (e.g., in vivo imaging in a subject). The method includes: (i) contacting the sample with an antibody molecule described herein, or administering to the subject, the antibody molecule; (optionally) (ii) contacting a reference sample, e.g., a control sample (e.g., a control biological sample, such as plasma, tissue, biopsy) or a control subject)); and (iii) detecting formation of a complex between the antibody molecule, and the sample or subject, or the control sample or subject, wherein a change, e.g., a statistically significant change, in the formation of the complex in the sample or subject relative to the control sample or subject is indicative of the presence of NKp30 in the sample. The antibody molecule can be directly or indirectly labeled with a detectable substance to facilitate detection of the bound or unbound antibody. Suitable detectable substances include various enzymes, prosthetic groups, fluorescent materials, luminescent materials and radioactive materials, as described above and described in more detail below.

[0374] The term “sample,” as it refers to samples used for detecting polypeptides includes, but is not limited to, cells, cell lysates, proteins or membrane extracts of cells, body fluids, or tissue samples.

[0375] Complex formation between the antibody molecule and NKp30 can be detected by measuring or visualizing either the binding molecule bound to the NKp30 antigen or unbound binding molecule. Conventional detection assays can be used, e.g., an enzyme-linked immunosorbent assays (ELISA), a radioimmunoassay (RIA) or tissue immunohistochemistry. Alternative to labeling the antibody molecule, the presence of NKp30 can be assayed in a sample by a competition immunoassay utilizing standards labeled with a detectable substance and an unlabeled antibody molecule. In this assay, the biological sample, the labeled standards and the antibody molecule are combined and the amount of labeled standard bound to the unlabeled binding molecule is determined. The amount of NKp30 in the sample is inversely proportional to the amount of labeled standard bound to the antibody molecule.

### EXAMPLES

[0376] The Examples below are set forth to aid in the understanding of the inventions but are not intended to, and should not be construed to, limit its scope in any way.

### Example 1: Immunization of Armenian Hamster to Generate Anti-NKp30 Antibodies

[0377] Briefly, armenian hamsters were immunized with the extracellular domain of human NKp30 protein in complete Freund’s adjuvant and boosted twice on day 14 and day 28 with NKp30 in incomplete Freund’s adjuvant (IFA). On day 56 one more boost in IFA was given and the animals harvested three days later. Spleens were collected and fused with P3X63Ag8.653 murine myeloma cell line. 0.9 × 10^5 cells/well in 125 ul were seated in 96 well plate and fed with 125 µl of I-20 + 2ME + HAT (IMDM (4 g/L glucose) supplemented with 20% fetal bovine serum, 4 mM L-glutamine, 1 mM sodium pyruvate, 50 U penicillin, 50 µg streptomycin and 50 µM 2-ME in the absence or presence of HAT or HT for selection, and Hybridoma Cloning Factor (1% final) on days 7, 11 and thereafter as needed. At approximately 2 weeks after fusion (cells are about 50% confluent), supernatant was collected and assayed for binding.

### Example 2: Hybridoma Screen for NKp30 mAbs

[0378] Expi293 cells were transfected with BG160 (hNKp30 cell antigen) 18 hours prior to screening. The day of screening, transfected cells were diluted to 0.05 ×10^{^6}/mL and anti-Armenian hamster Fc Alexa Fluor 488 added to a final concentration of 0.4 ug/mL. 50 uL (2,500 cells) of this mixture was added to each well of a 384 well plate. The same density of untransfected 293 cells with secondary were used as a negative control. 5 uL of hybridoma supematant was added to the cell mixture and the plate incubated for 1 hour at 37° C. The plates were then imaged on Mirrorball. Positive clones were identified and subcloned by serial dilution to obtain clonal selected hybridoma. After reconfirmation using the same protocols the hybridoma cells were harvested and the corresponding heavy and light chain sequences recovered. The DNA was subcloned into pcDNA3.4 for subsequent expression of the corresponding antibodies and further validation.

### Example 3: Binding of NKp30 Antibodies to NK92 Cells

[0379] NK-92 cells were washed with PBS containing 0.5% BSA and 0.1% sodium azide (staining buffer) and added to 96-well V-bottom plates with 200,000 cells/well. Hamster NKp30 antibodies were added to the cells in 2.0 fold serial dilutions and incubated for 1 hour at room temperature. The plates were washed twice with staining buffer. The secondary antibody against hamster Fc conjugated to AF647 (Jackson, 127-605-160) was added at 1:100 dilution (1.4 mg/ml stock) and incubated with the cells for 30 minutes at 4° C. followed by washing with staining buffer. Cells were subsequently were fixed for 10 minutes with 4% paraformaldehyde at room temperature. The plates were read on CytoFLEX LS (Beckman Coulter). Data was calculated as the percent-AF747 positive population (FIG. 1).

### Example 4: Bioassay to Measure Activity of NKp30 Antibodies Using NK92 Cell Line

[0380] NKp30 antibodies were three-fold serially diluted in PBS and incubated at 2-8° C. overnight in flat bottom 96 well plates. Plates were washed twice in PBS and 40,000 NK-92 cells were added in growth medium containing IL-2. Plates were incubated at 37° C., 5% CO2, humidified incubator for 16-24 hours before supernatants were collected. IFNγ levels in supernatants was measured following MSD assay instructions (FIG. 2). Supernatant collected from cells incubated with hamster isotype IgG was used as negative control and supernatants from cells incubated with NKp30 monoclonal antibody (R&D, clone 210847) was utilized as a positive control. Data were generated using hamster anti-NKp30 mABs.

### Example 5: Generation and Characterization of Humanized Anti-NKp30 Antibodies

[0381] A series of hamster anti-NKp30 antibodies were selected. These antibodies were shown to bind to human NKp30 and cynomolgus NKp30 and induce IFNγ production from NK-90 cells (data not shown). The VH and VL sequences of exemplary hamster anti-NKp30 antibodies 15E1, 9G1, 15H6, 9D9, 3A12, and 12D10 are disclosed in Table 9. The VH and VL sequences of exemplary humanized anti-NKp30 antibodies based on 15E1, 9G1, and 15H6 are also disclosed in Table 9. The Kabat CDRs of these antibodies are disclosed in Table 18 and Table 8.

[0382] Two humanized constructs based on 15E1 were selected. The first construct BJM0407 is a Fab comprising a heavy chain variable region comprising the amino acid sequence of SEQ ID NO: 7302 and a lambda light chain variable region comprising the amino acid sequence of SEQ ID NO: 7305. Its corresponding scFv construct BJM0859 comprises the amino acid sequence of SEQ ID NO: 7310. The second construct BJM0411 is a Fab comprising a heavy chain variable region comprising the amino acid sequence of SEQ ID NO: 7302 and a kappa light chain variable region comprising the amino acid sequence of SEQ ID NO: 7309. Its corresponding scFv construct BJM0860 comprises the amino acid sequence of SEQ ID NO: 7311. BJM0407 and BJM0411 showed comparable biophysical characteristics, e.g., binding affinity to NKp30 and thermal stability. The scFv constructs BJM0859 and BJM0860 also showed comparable biophysical properties.

### Example 6: Biacore Analysis of Exemplary Anti-NKp30 Antibody Molecules

[0383] In this example, a series of exemplary anti-NKp30 antibody molecules were analyzed for their binding affinity for NKp30. Briefly, surface plasmon resonance (SPR) measurements were performed by using the BIAcore T200. Human NKp30 (BKM0179) was immobilized on a CM5 chip via anti-mouse Fc antibody to a response of 50 RU. Each exemplary antibody construct were injected at concentrations of 3.9, 7.8, 15.6, 31.2, 62.5, and 125 nM, and at a flow rate of 20 µl/min, over the surface on which the human NKp30 was immobilized. The data was fit using a 1:1 binding model.

[0384] As shown in Table 19, most of the exemplary antibodies showed preserved affinity to human NKp30 compared to the parental antibody.

TABLE 19

Biacore results

| | | |
|---|---|---|
| Construct | Description | Human Nkp30 (BKM0179) |
| BJM1078 | BJM0407 Parental | 1.48 nM |
| BJM1079 | BJM0411 Parental | 1.26 nM |
| BKM0138 | BJM0411 VL-N95A | 3.2 nM |
| BKM0139 | BJM0411 VL-D92A | 3.2 nM |
| BKM0140 | BJM0407 VL-D92A | 3.3 nM |
| BKM0141 | BJM0407 VL-N95A | 3.0 nM |
| BKM0142 | BJM0411 VH-N60A | 1.28 nM |
| BKM0143 | BJM0407 VH-N60A | 1.45 nM |
| BKM0144 | BJM0411 VH-N60A-VL-D92A-N95A | 6.4 nM |
| BKM0145 | BJM0407 VH-N60A-VL-D92A-N95A | 4.2 nM |

### INCORPORATION BY REFERENCE

[0385] All publications, patents, and Accession numbers mentioned herein are hereby incorporated by reference in their entirety as if each individual publication or patent was specifically and individually indicated to be incorporated by reference.

### EQUIVALENTS

[0386] While specific embodiments of the subject invention have been discussed, the above specification is illustrative and not restrictive. Many variations of the invention will become apparent to those skilled in the art upon review of this specification and the claims below. The full scope of the invention should be determined by reference to the claims, along with their full scope of equivalents, and the specification, along with such variations.

### EXEMPLARY EMBODIMENTS

[0387] Additional features of any of the aforesaid multifunctional molecules, nucleic acids, vectors, host cells, or methods include one or more of the following exemplary embodiments.

[0388] Those skilled in the art will recognize, or be able to ascertain using no more than routine experimentation, many equivalents to the specific embodiments of the invention described herein. Such equivalents are intended to be encompassed by the following exemplary embodiments.

### Exemplary Embodiment 1

[0389] Disclosed herein are antibody molecules (e.g., humanized antibody molecules) that bind to NKp30 with high affinity and specificity. Nucleic acid molecules encoding the antibody molecules, expression vectors, host cells and methods for making the antibody molecules are also provided. Multi- or bispecific or multifunctional antibody molecules and pharmaceutical compositions comprising the antibody molecules are also provided. The anti- NKp30antibody molecules disclosed herein can be used (alone or in combination with other agents or therapeutic modalities) to treat, prevent and/or diagnose disorders, such as cancerous disorders (e.g., solid and soft-tissue tumors), as well as autoimmune and infectious diseases. Thus, compositions and methods for detecting NKp30, as well as methods for treating various disorders including cancer, autoimmune and/or infectious diseases, using the anti- NKp30 antibody molecules are disclosed herein.

[0390] Accordingly, in one aspect, the invention features an antibody molecule (e.g., an isolated or recombinant antibody molecule), comprising one or more sequences according to the following enumerated embodiments. Additional features of any of the disclosed antibody molecules, multifunctional molecules, nucleic acids, vectors, host cells, or methods include one or more of the following enumerated embodiments.

[0391] Those skilled in the art will recognize, or be able to ascertain using no more than routine experimentation, many equivalents to the specific embodiments of the invention described herein. Such equivalents are intended to be encompassed by the following enumerated embodiments.

[0392] In an aspect, the disclosure features an isolated antibody molecule that binds to NKp30, comprising:
[0393] (a) a heavy chain complementarity determining region 1 (VHCDR1), a heavy chain complementarity determining region 2 (VHCDR2), and/or a heavy chain complementarity determining region 3 (VHCDR3) described in Table 8A, or a sequence with no more than 1, 2, 3, or 4 mutations, e.g., substitutions, additions, or deletions; and/or
[0394] (b) a light chain complementarity determining region 1 (VLCDR1), a light chain complementarity determining region 2 (VLCDR2), and/or a light chain complementarity determining region 3 (VLCDR3) described in Table 8B, or a sequence with no more than 1, 2, 3, or 4 mutations, e.g., substitutions, additions, or deletions.

[0395] In some embodiments, the VHCDR1 comprises the amino acid sequence of any of SEQ ID NOs: 19, 33, 47, 61, 7397, 89, 103, or 116, or an amino acid sequence with no more than 1, 2, 3, or 4 mutations, e.g., substitutions, additions, or deletions.

[0396] In some embodiments, the VHCDR2 comprises the amino acid sequence of any of SEQ ID NOs: 21, 35, 49, 63, 7399, 91, 105, or 118, or an amino acid sequence with no more than 1, 2, 3, or 4 mutations, e.g., substitutions, additions, or deletions.

[0397] In some embodiments, the VHCDR3 comprises the amino acid sequence of any of SEQ ID NOs: 23, 37, 51, 65, 79, 93, 107, or 120, or an amino acid sequence with no more than 1, 2, 3, or 4 mutations, e.g., substitutions, additions, or deletions.

[0398] In some embodiments, the VLCDR1 comprises the amino acid sequence of any of SEQ ID NOs: 26, 40, 54, 68, 82, 96, 110, or 123, or an amino acid sequence with no more than 1, 2, 3, or 4 mutations, e.g., substitutions, additions, or deletions.

[0399] In some embodiments, the VLCDR2 comprises the amino acid sequence of any of SEQ ID NOs: 28, 7393, 56, 70, 84, 98, 112, or 125, or an amino acid sequence with no more than 1, 2, 3, or 4 mutations, e.g., substitutions, additions, or deletions.

[0400] In some embodiments, the VLCDR3 comprises the amino acid sequence of any of SEQ ID NOs: 30, 7395, 58, 72, 86, 100, 113, or 127, or an amino acid sequence with no more than 1, 2, 3, or 4 mutations, e.g., substitutions, additions, or deletions.

[0401] In some embodiments, the antibody molecule comprises:
[0402] (a) a heavy chain framework region 1 (VHFWR1), a heavy chain framework region 2 (VHFWR1), a heavy chain framework region 3 (VHFWR3), and/or a heavy chain framework region 4 (VHFWR4) described in Table 8A, or an amino acid sequence with no more than 1, 2, 3, or 4 mutations, e.g., substitutions, additions, or deletions; and/or
[0403] (b) a light chain framework region 1 (VLFWR1), a light chain framework region 2 (VLFWR1), a light chain framework region 3 (VLFWR3), and/or a light chain framework region 4 (VLFWR4) described in Table 8B, or an amino acid sequence with no more than 1, 2, 3, or 4 mutations, e.g., substitutions, additions, or deletions.

[0404] In some embodiments, the antibody molecule comprises:
[0405] (a) a heavy chain variable region (VH) described in Table 9, e.g., a VH comprising the amino acid sequence of any of SEQ ID NOs: 1-8, or an amino acid sequence having at least about 75%, 80%, 85%, 90%, 95%, or 99% sequence identity thereto; and/or
[0406] (b) a light chain variable region (VL) described in Table 9, e.g., a VL comprising the amino acid sequence of any of SEQ ID NOs: 9-16, or an amino acid sequence having at least about 75%, 80%, 85%, 90%, 95%, or 99% sequence identity thereto.

[0407] In some embodiments, the antibody molecule comprises an amino acid sequence described in Table 10, e.g., the amino acid sequence of any of SEQ ID NOs: 17, and 7386-7392, or an amino acid sequence having at least about 75%, 80%, 85%, 90%, 95%, or 99% sequence identity thereto.

[0408] In an aspect, the disclosure features a multispecific molecule comprising an antibody molecule described herein.

[0409] In some embodiments, the multispecific molecule further comprises one, two, three, four or more of: (a) a tumor targeting moiety, e.g., as described herein; (b) a cytokine molecule, e.g., as described herein; (c) a T cell engager, e.g., as described herein; or (d) a stromal modifying moiety, e.g., as described herein.

[0410] In some embodiments, the multispecific molecule further comprises a binding specificity that binds to an autoreactive T cell, e.g., an antigen present on the surface of an autoreactive T cell that is associated with the inflammatory or autoimmune disorder.

[0411] In some embodiments, the multispecific molecule further comprises a binding specificity that binds to an infected cell, e.g., a viral or bacterial infected cell.

[0412] In some embodiments, the antibody molecule is a monospecific antibody molecule, a bispecific antibody molecule, or a trispecific antibody molecule. In some embodiments, the multispecific molecule is a bispecific antibody molecule, or a trispecific antibody molecule.

[0413] In some embodiments, the antibody molecule or the multispecific molecule is a monovalent antibody molecule, a bivalent antibody molecule, or a trivalent antibody molecule.

[0414] In some embodiments, the antibody molecule or the multispecific molecule is a full antibody (e.g., an antibody that includes at least one, and preferably two, complete heavy chains, and at least one, and preferably two, complete light chains), or an antigen-binding fragment (e.g., a Fab, F(ab′)₂, Fv, a single chain Fv, a single domain antibody, a diabody (dAb), a bivalent antibody, or bispecific antibody or fragment thereof, a single domain variant thereof, or a camelid antibody).

[0415] In some embodiments, the antibody molecule or the multispecific molecule comprises a heavy chain constant region chosen from IgG1, IgG2, IgG3, or IgG4, or a fragment thereof.

[0416] In some embodiments, the antibody molecule or the multispecific molecule comprises a light chain constant region chosen from the light chain constant regions of kappa or lambda, or a fragment thereof.

[0417] In some embodiments, the immunoglobulin chain constant region (e.g., Fc region) is altered, e.g., mutated, to increase or decrease one or more of: Fc receptor binding, antibody glycosylation, the number of cysteine residues, effector cell function, or complement function.

[0418] In some embodiments, an interface of a first and second immunoglobulin chain constant regions (e.g., Fc region) is altered, e.g., mutated, to increase or decrease dimerization, e.g., relative to a non-engineered interface.

[0419] In some embodiments, the dimerization of the immunoglobulin chain constant region (e.g., Fc region) is enhanced by providing an Fc interface of a first and a second Fc region with one or more of: a paired cavity-protuberance (“knob-in-a hole”), an electrostatic interaction, or a strand-exchange, such that a greater ratio of heteromultimer:homomultimer forms, e.g., relative to a non-engineered interface.

[0420] In some embodiments, the immunoglobulin chain constant region (e.g., Fc region) comprises an amino acid substitution at a position chosen from one or more of 347, 349, 350, 351, 366, 368, 370, 392, 394, 395, 397, 398, 399, 405, 407, or 409, e.g., of the Fc region of human IgG1.

[0421] In some embodiments, the immunoglobulin chain constant region (e.g., Fc region) comprises an amino acid substitution chosen from: T366S, L368A, or Y407V (e.g., corresponding to a cavity or hole), or T366W (e.g., corresponding to a protuberance or knob), or a combination thereof.

[0422] In some embodiments, the antibody molecule or the multispecific molecule further comprises a linker, e.g., a linker between one or more of: the targeting moiety and the cytokine molecule or the stromal modifying moiety, the targeting moiety and the immune cell engager, the cytokine molecule or the stromal modifying moiety, and the immune cell engager, the cytokine molecule or the stromal modifying moiety and the immunoglobulin chain constant region (e.g., the Fc region), the targeting moiety and the immunoglobulin chain constant region, or the immune cell engager and the immunoglobulin chain constant region.

[0423] In some embodiments, the linker is selected from: a cleavable linker, a non-cleavable linker, a peptide linker, a flexible linker, a rigid linker, a helical linker, or a non-helical linker. In some embodiments, the linker is a peptide linker. In some embodiments, the peptide linker comprises Gly and Ser.

[0424] In another aspect, the disclosure features an isolated nucleic acid molecule, which comprises the nucleotide sequence encoding any of the antibody molecules or multispecific or multifunctional molecules described herein, or a nucleotide sequence substantially homologous thereto (e.g., at least 95% to 99.9% identical thereto).

[0425] In another aspect, the disclosure features an isolated nucleic acid encoding an antibody molecule described herein or a multispecific molecule described herein.

[0426] In another aspect, the disclosure features a vector, e.g., an expression vector, comprising one or more of the nucleic acid molecules described herein.

[0427] In another aspect, the disclosure features a host cell comprising a nucleic acid molecule described herein or a vector described herein.

[0428] In another aspect, the disclosure features a method of making, e.g., producing, an antibody molecule described herein or a multispecific or multifunctional molecule polypeptide described herein, comprising culturing a host cell described herein, under suitable conditions, e.g., conditions suitable for gene expression and/or homo- or heterodimerization.

[0429] In another aspect, the disclosure features a pharmaceutical composition comprising an antibody molecule described herein or a multispecific or multifunctional molecule polypeptide described herein and a pharmaceutically acceptable carrier, excipient, or stabilizer.

[0430] In another aspect, the disclosure features a method of treating a cancer, comprising administering to a subject in need thereof an antibody molecule described herein or a multispecific or multifunctional molecule polypeptide described herein, wherein the antibody molecule or the multispecific or multifunctional molecule polypeptide is administered in an amount effective to treat the cancer.

[0431] In another aspect, the disclosure features an antibody molecule described herein or a multispecific or multifunctional molecule polypeptide described herein for use in treating cancer.

[0432] In some embodiments, the cancer is a solid tumor cancer, or a metastatic lesion. In some embodiments, the solid tumor cancer is one or more of pancreatic (e.g., pancreatic adenocarcinoma), breast, colorectal, lung (e.g., small or non-small cell lung cancer), skin, ovarian, or liver cancer. In some embodiments, the cancer is a hematological cancer.

[0433] In some embodiments, the method or use further comprising administering a second therapeutic treatment. In some embodiments, the second therapeutic treatment comprises a therapeutic agent (e.g., a chemotherapeutic agent, a biologic agent, hormonal therapy), radiation, or surgery. In some embodiments, the therapeutic agent is selected from: a chemotherapeutic agent, or a biologic agent.

[0434] In an aspect, the disclosure features a method of treating an autoimmune or an inflammatory disorder, comprising administering to a subject in need thereof an antibody molecule described herein or a multispecific or multifunctional molecule polypeptide described herein, wherein the antibody molecule or the multispecific or multifunctional molecule polypeptide is administered in an amount effective to treat the autoimmune or the inflammatory disorder.

[0435] In an aspect, the disclosure features an antibody molecule described herein or a multispecific or multifunctional molecule polypeptide described herein for use in treating an autoimmune or an autoinflammatory disorder.

[0436] In an aspect, the disclosure features a method of treating an infectious disorder, comprising administering to a subject in need thereof an antibody molecule described herein or a multispecific or multifunctional molecule polypeptide described herein, wherein the antibody molecule or the multispecific or multifunctional molecule polypeptide is administered in an amount effective to treat the infectious disorder.

[0437] In an aspect, the disclosure features an antibody molecule described herein or a multispecific or multifunctional molecule polypeptide described herein for use in treating an infectious disorder.

### Exemplary Embodiment 2

[0438] The present disclosure also includes any of the following enumerated embodiments:

[0439] 1. An isolated antibody molecule that binds to NKp30, comprising:
[0440] (i) a heavy chain variable region (VH) comprising a heavy chain complementarity determining region 1 (VHCDR1) amino acid sequence of SEQ ID NO: 7313 (or a sequence with no more than 1, 2, 3, or 4 mutations, e.g., substitutions, additions, or deletions), a VHCDR2 amino acid sequence of SEQ ID NO: 6001 (or a sequence with no more than 1, 2, 3, or 4 mutations, e.g., substitutions, additions, or deletions, and/or a VHCDR3 amino acid sequence of SEQ ID NO: 7315 (or a sequence with no more than 1, 2, 3, or 4 mutations, e.g., substitutions, additions, or deletions; and/or
[0441] (ii) a light chain variable region (VL) comprising a light chain complementarity determining region 1 (VLCDR1) amino acid sequence of SEQ ID NO: 7326 (or a sequence with no more than 1, 2, 3, or 4 mutations, e.g., substitutions, additions, or deletions), a VLCDR2 amino acid sequence of SEQ ID NO: 7327 (or a sequence with no more than 1, 2, 3, or 4 mutations, e.g., substitutions, additions, or deletions), and/or a VLCDR3 amino acid sequence of SEQ ID NO: 7329 (or a sequence with no more than 1, 2, 3, or 4 mutations, e.g., substitutions, additions, or deletions).

[0442] 2. The antibody molecule of embodiment 1, wherein the antigen binding domain comprises:
[0443] (i) a VH comprising the amino acid sequence of any of SEQ ID NOs: 7298 or 7300-7304 (or an amino acid sequence having at least about 75%, 80%, 85%, 90%, 95%, or 99% sequence identity to any of SEQ ID NOs: 7298 or 7300-7304), and/or
[0444] (ii) a VL comprising the amino acid sequence of any of SEQ ID NOs: 7299 or 7305-7309 (or an amino acid sequence having at least about 93%, 95%, or 99% sequence identity to any of SEQ ID NOs: 7299 or 7305-7309).

[0445] 3. The antibody molecule of embodiment 2, wherein the antigen binding domain comprises:
[0446] (i)) a VH comprising the amino acid sequence of SEQ ID NO: 7302 (or an amino acid sequence having at least about 75%, 80%, 85%, 90%, 95%, or 99% sequence identity to 7302), and a VL comprising the amino acid sequence of SEQ ID NO: 7305 (or an amino acid sequence having at least about 75%, 80%, 85%, 90%, 95%, or 99% sequence identity to 7305); or
[0447] (ii) a VH comprising the amino acid sequence of SEQ ID NO: 7302 (or an amino acid sequence having at least about 75%, 80%, 85%, 90%, 95%, or 99% sequence identity to 7302), and a VL comprising the amino acid sequence of SEQ ID NO: 7309 (or an amino acid sequence having at least about 75%, 80%, 85%, 90%, 95%, or 99% sequence identity to 7309).

[0448] 4. The antibody molecule of any of embodiments 1-3, wherein the antigen binding domain comprises:
[0449] (i) an amino acid sequence of SEQ ID NO: 7310 (or an amino acid sequence having at least about 75%, 80%, 85%, 90%, 95%, or 99% sequence identity to 7310); or
[0450] (ii) an amino acid sequence of SEQ ID NO: 7311 (or an amino acid sequence having at least about 75%, 80%, 85%, 90%, 95%, or 99% sequence identity to 7311).

[0451] 5. An isolated antibody molecule that binds to NKp30, comprising:
[0452] (i) a heavy chain variable region (VH) comprising a heavy chain complementarity determining region 1 (VHCDR1) amino acid sequence of SEQ ID NO: 6000 (or a sequence with no more than 1, 2, 3, or 4 mutations, e.g., substitutions, additions, or deletions), a VHCDR2 amino acid sequence of SEQ ID NO: 6001 (or a sequence with no more than 1, 2, 3, or 4 mutations, e.g., substitutions, additions, or deletions), and/or a VHCDR3 amino acid sequence of SEQ ID NO: 6002 (or a sequence with no more than 1, 2, 3, or 4 mutations, e.g., substitutions, additions, or deletions), and
[0453] (ii) a light chain variable region (VL) comprising a light chain complementarity determining region 1 (VLCDR1) amino acid sequence of SEQ ID NO: 6063 (or a sequence with no more than 1, 2, 3, or 4 mutations, e.g., substitutions, additions, or deletions), a VLCDR2 amino acid sequence of SEQ ID NO: 6064 (or a sequence with no more than 1, 2, 3, or 4 mutations, e.g., substitutions, additions, or deletions), and/or a VLCDR3 amino acid sequence of SEQ ID NO: 7293 (or a sequence with no more than 1, 2, 3, or 4 mutations, e.g., substitutions, additions, or deletions).

[0454] 6. The antibody molecule of embodiment 5, wherein the antigen binding domain comprises: (i) a heavy chain variable region (VH) comprising a heavy chain complementarity determining region 1 (VHCDR1) amino acid sequence of SEQ ID NO: 6000, a VHCDR2 amino acid sequence of SEQ ID NO: 6001, and/or a VHCDR3 amino acid sequence of SEQ ID NO: 6002, and

[0455] (ii) a light chain variable region (VL) comprising a light chain complementarity determining region 1 (VLCDR1) amino acid sequence of SEQ ID NO: 6063, a VLCDR2 amino acid sequence of SEQ ID NO: 6064, and/or a VLCDR3 amino acid sequence of SEQ ID NO: 7293.

[0456] 7. The antibody molecule of embodiment 5 or 6, wherein the antigen binding domain comprises:
[0457] (1) a heavy chain variable region (VH) comprising a heavy chain framework region 1 (VHFWR1) amino acid sequence of SEQ ID NO: 6003 (or a sequence with no more than 1, 2, 3, 4, 5, or 6 mutations, e.g., substitutions, additions, or deletions, therefrom), a VHFWR2 amino acid sequence of SEQ ID NO: 6004 (or a sequence with no more than 1, 2, 3, 4, 5, or 6 mutations, e.g., substitutions, additions, or deletions, therefrom), a VHFWR3 amino acid sequence of SEQ ID NO: 6005 (or a sequence with no more than 1, 2, 3, 4, 5, or 6 mutations, e.g., substitutions, additions, or deletions, therefrom), or a VHFWR4 amino acid sequence of SEQ ID NO: 6006 (or a sequence with no more than 1, 2, 3, 4, 5, or 6 mutations, e.g., substitutions, additions, or deletions, therefrom), and/or
[0458] (2) a light chain variable region (VL) comprising a light chain framework region 1 (VLFWR1) amino acid sequence of SEQ ID NO: 6066 (or a sequence with no more than 1, 2, 3, 4, 5, or 6 mutations, e.g., substitutions, additions, or deletions, therefrom), a VLFWR2 amino acid sequence of SEQ ID NO: 6067 (or a sequence with no more than 1, 2, 3, 4, 5, or 6 mutations, e.g., substitutions, additions, or deletions, therefrom), a VLFWR3 amino acid sequence of SEQ ID NO: 7292 (or a sequence with no more than 1, 2, 3, 4, 5, or 6 mutations, e.g., substitutions, additions, or deletions, therefrom), or a VLFWR4 amino acid sequence of SEQ ID NO: 6069 (or a sequence with no more than 1, 2, 3, 4, 5, or 6 mutations, e.g., substitutions, additions, or deletions, therefrom).

[0459] 8. The antibody molecule of embodiment 7, wherein the antigen binding domain comprises:

[0460] a heavy chain variable region (VH) comprising a heavy chain framework region 1 (VHFWR1) amino acid sequence of SEQ ID NO: 6003, a VHFWR2 amino acid sequence of SEQ ID NO: 6004, a VHFWR3 amino acid sequence of SEQ ID NO: 6005, or a VHFWR4 amino acid sequence of SEQ ID NO: 6006, and (3) a light chain variable region (VL) comprising a light chain framework region 1 (VLFWR1) amino acid sequence of SEQ ID NO: 6066, a VLFWR2 amino acid sequence of SEQ ID NO: 6067, a VLFWR3 amino acid sequence of SEQ ID NO: 7292, or a VLFWR4 amino acid sequence of SEQ ID NO: 6069.

[0461] 9. The antibody molecule of any one of embodiments 5-8, wherein the antigen binding domain comprises:
[0462] (i) a VH comprising the amino acid sequence of SEQ ID NO: 6121 (or an amino acid sequence having at least about 75%, 80%, 85%, 90%, 95%, or 99% sequence identity to SEQ ID NO: 6121), and/or
[0463] (ii) a VL comprising the amino acid sequence of SEQ ID NO: 7294 (or an amino acid sequence having at least about 93%, 95%, or 99% sequence identity to SEQ ID NO: 7294).

[0464] 10. The antibody molecule of any one of embodiments 5-9, wherein the antigen binding domain comprises a heavy chain comprising the amino acid sequence of SEQ ID NOs: 6148 or 6149 (or an amino acid sequence having at least about 75%, 80%, 85%, 90%, 95%, or 99% sequence identity to SEQ ID NOs: 6148 or 6149).

[0465] 11. The antibody molecule of either of embodiments 5-10, wherein the antigen binding domain comprises a light chain comprising the amino acid sequence of SEQ ID NO: 6150 (or an amino acid sequence having at least about 75%, 80%, 85%, 90%, 95%, or 99% sequence identity to SEQ ID NO: 6150).

[0466] 12. The antibody molecule of either of embodiments 5-11, wherein the antigen binding domain comprises a heavy chain comprising the amino acid sequence of SEQ ID NOs: 6148 or 6149 (or an amino acid sequence having at least about 75%, 80%, 85%, 90%, 95%, or 99% sequence identity to SEQ ID NOs: 6148 or 6149), and a light chain comprising the amino acid sequence of SEQ ID NO: 6150 (or an amino acid sequence having at least about 75%, 80%, 85%, 90%, 95%, or 99% sequence identity to SEQ ID NO: 6150).

[0467] 13. The antibody molecule of any of embodiments 5-12, wherein the antigen binding domain comprises a heavy chain variable region (VH) comprising a heavy chain framework region 1 (VHFWR1) amino acid sequence of SEQ ID NO: 6014 (or a sequence with no more than 1, 2, 3, 4, 5, or 6 mutations, e.g., substitutions, additions, or deletions, therefrom), a VHFWR2 amino acid sequence of SEQ ID NO: 6015 (or a sequence with no more than 1, 2, 3, 4, 5, or 6 mutations, e.g., substitutions, additions, or deletions, therefrom), a VHFWR3 amino acid sequence of SEQ ID NO: 6016 (or a sequence with no more than 1, 2, 3, 4, 5, or 6 mutations, e.g., substitutions, additions, or deletions, therefrom), or a VHFWR4 amino acid sequence of SEQ ID NO: 6017 (or a sequence with no more than 1, 2, 3, 4, 5, or 6 mutations, e.g., substitutions, additions, or deletions, therefrom).

[0468] 14. The antibody molecule of embodiment 13, wherein the antigen binding domain comprises a heavy chain variable region (VH) comprising a heavy chain framework region 1 (VHFWR1) amino acid sequence of SEQ ID NO: 6014, a VHFWR2 amino acid sequence of SEQ ID NO: 6015, a VHFWR3 amino acid sequence of SEQ ID NO: 6016, or a VHFWR4 amino acid sequence of SEQ ID NO: 6017.

[0469] 15. The antibody molecule of embodiment 14, wherein the antigen binding domain comprises a VH comprising the amino acid sequence of SEQ ID NO: 6123 (or an amino acid sequence having at least about 75%, 80%, 85%, 90%, 95%, or 99% sequence identity to SEQ ID NO: 6123).

[0470] 16. The antibody molecule of any of embodiments 5-15, wherein the antigen binding domain comprises a heavy chain variable region (VH) comprising a heavy chain framework region 1 (VHFWR1) amino acid sequence of SEQ ID NO: 6018 (or a sequence with no more than 1, 2, 3, 4, 5, or 6 mutations, e.g., substitutions, additions, or deletions, therefrom), a VHFWR2 amino acid sequence of SEQ ID NO: 6019 (or a sequence with no more than 1, 2, 3, 4, 5, or 6 mutations, e.g., substitutions, additions, or deletions, therefrom), a VHFWR3 amino acid sequence of SEQ ID NO: 6020 (or a sequence with no more than 1, 2, 3, 4, 5, or 6 mutations, e.g., substitutions, additions, or deletions, therefrom), or a VHFWR4 amino acid sequence of SEQ ID NO: 6021 (or a sequence with no more than 1, 2, 3, 4, 5, or 6 mutations, e.g., substitutions, additions, or deletions, therefrom).

[0471] 17. The antibody molecule of embodiment 16, wherein the antigen binding domain comprises a heavy chain variable region (VH) comprising a heavy chain framework region 1 (VHFWR1) amino acid sequence of SEQ ID NO: 6018, a VHFWR2 amino acid sequence of SEQ ID NO: 6019, a VHFWR3 amino acid sequence of SEQ ID NO: 6020, or a VHFWR4 amino acid sequence of SEQ ID NO: 6021.

[0472] 18. The antibody molecule of embodiment 17, wherein the antigen binding domain comprises a VH comprising the amino acid sequence of SEQ ID NO: 6124 (or an amino acid sequence having at least about 75%, 80%, 85%, 90%, 95%, or 99% sequence identity to SEQ ID NO: 6124).

[0473] 19. The antibody molecule of any of embodiments 5-18, wherein the antigen binding domain comprises a heavy chain variable region (VH) comprising a heavy chain framework region 1 (VHFWR1) amino acid sequence of SEQ ID NO: 6022 (or a sequence with no more than 1, 2, 3, 4, 5, or 6 mutations, e.g., substitutions, additions, or deletions, therefrom), a VHFWR2 amino acid sequence of SEQ ID NO: 6023 (or a sequence with no more than 1, 2, 3, 4, 5, or 6 mutations, e.g., substitutions, additions, or deletions, therefrom), a VHFWR3 amino acid sequence of SEQ ID NO: 6024 (or a sequence with no more than 1, 2, 3, 4, 5, or 6 mutations, e.g., substitutions, additions, or deletions, therefrom), or a VHFWR4 amino acid sequence of SEQ ID NO: 6025 (or a sequence with no more than 1, 2, 3, 4, 5, or 6 mutations, e.g., substitutions, additions, or deletions, therefrom).

[0474] 20. The antibody molecule of embodiment 19, wherein the antigen binding domain comprises a heavy chain variable region (VH) comprising a heavy chain framework region 1 (VHFWR1) amino acid sequence of SEQ ID NO: 6022, a VHFWR2 amino acid sequence of SEQ ID NO: 6023, a VHFWR3 amino acid sequence of SEQ ID NO: 6024, or a VHFWR4 amino acid sequence of SEQ ID NO: 6025.

[0475] 21. The antibody molecule of embodiment 20, wherein the antigen binding domain comprises a VH comprising the amino acid sequence of SEQ ID NO: 6125 (or an amino acid sequence having at least about 75%, 80%, 85%, 90%, 95%, or 99% sequence identity to SEQ ID NO: 6125).

[0476] 22. The antibody molecule of any of embodiments 5-21, wherein the antigen binding domain comprises a heavy chain variable region (VH) comprising a heavy chain framework region 1 (VHFWR1) amino acid sequence of SEQ ID NO: 6026 (or a sequence with no more than 1, 2, 3, 4, 5, or 6 mutations, e.g., substitutions, additions, or deletions, therefrom), a VHFWR2 amino acid sequence of SEQ ID NO: 6027 (or a sequence with no more than 1, 2, 3, 4, 5, or 6 mutations, e.g., substitutions, additions, or deletions, therefrom), a VHFWR3 amino acid sequence of SEQ ID NO: 6028 (or a sequence with no more than 1, 2, 3, 4, 5, or 6 mutations, e.g., substitutions, additions, or deletions, therefrom), or a VHFWR4 amino acid sequence of SEQ ID NO: 6029 (or a sequence with no more than 1, 2, 3, 4, 5, or 6 mutations, e.g., substitutions, additions, or deletions, therefrom).

[0477] 23. The antibody molecule of embodiment 22, wherein the antigen binding domain comprises a heavy chain variable region (VH) comprising a heavy chain framework region 1 (VHFWR1) amino acid sequence of SEQ ID NO: 6026, a VHFWR2 amino acid sequence of SEQ ID NO: 6027, a VHFWR3 amino acid sequence of SEQ ID NO: 6028, or a VHFWR4 amino acid sequence of SEQ ID NO: 6029.

[0478] 24. The antibody molecule of embodiment 23, wherein the antigen binding domain comprises a VH comprising the amino acid sequence of SEQ ID NO: 6126 (or an amino acid sequence having at least about 75%, 80%, 85%, 90%, 95%, or 99% sequence identity to SEQ ID NO: 6126).

[0479] 25. The antibody molecule of any of embodiments 5-24, wherein the antigen binding domain comprises a heavy chain variable region (VH) comprising a heavy chain framework region 1 (VHFWR1) amino acid sequence of SEQ ID NO: 6030 (or a sequence with no more than 1, 2, 3, 4, 5, or 6 mutations, e.g., substitutions, additions, or deletions, therefrom), a VHFWR2 amino acid sequence of SEQ ID NO: 6032 (or a sequence with no more than 1, 2, 3, 4, 5, or 6 mutations, e.g., substitutions, additions, or deletions, therefrom), a VHFWR3 amino acid sequence of SEQ ID NO: 6033 (or a sequence with no more than 1, 2, 3, 4, 5, or 6 mutations, e.g., substitutions, additions, or deletions, therefrom), or a VHFWR4 amino acid sequence of SEQ ID NO: 6034 (or a sequence with no more than 1, 2, 3, 4, 5, or 6 mutations, e.g., substitutions, additions, or deletions, therefrom).

[0480] 26. The antibody molecule of embodiment 25, wherein the antigen binding domain comprises a heavy chain variable region (VH) comprising a heavy chain framework region 1 (VHFWR1) amino acid sequence of SEQ ID NO: 6030, a VHFWR2 amino acid sequence of SEQ ID NO: 6032, a VHFWR3 amino acid sequence of SEQ ID NO: 6033, or a VHFWR4 amino acid sequence of SEQ ID NO: 6034.

[0481] 27. The antibody molecule of embodiment 26, wherein the antigen binding domain comprises a VH comprising the amino acid sequence of SEQ ID NO: 6127 (or an amino acid sequence having at least about 75%, 80%, 85%, 90%, 95%, or 99% sequence identity to SEQ ID NO: 6127).

[0482] 28. The antibody molecule of any of embodiments 5-27, wherein the antigen binding domain comprises a heavy chain variable region (VH) comprising a heavy chain framework region 1 (VHFWR1) amino acid sequence of SEQ ID NO: 6035 (or a sequence with no more than 1, 2, 3, 4, 5, or 6 mutations, e.g., substitutions, additions, or deletions, therefrom), a VHFWR2 amino acid sequence of SEQ ID NO: 6036 (or a sequence with no more than 1, 2, 3, 4, 5, or 6 mutations, e.g., substitutions, additions, or deletions, therefrom), a VHFWR3 amino acid sequence of SEQ ID NO: 6037 (or a sequence with no more than 1, 2, 3, 4, 5, or 6 mutations, e.g., substitutions, additions, or deletions, therefrom), or a VHFWR4 amino acid sequence of SEQ ID NO: 6038 (or a sequence with no more than 1, 2, 3, 4, 5, or 6 mutations, e.g., substitutions, additions, or deletions, therefrom).

[0483] 29. The antibody molecule of embodiment 28, wherein the antigen binding domain comprises a heavy chain variable region (VH) comprising a heavy chain framework region 1 (VHFWR1) amino acid sequence of SEQ ID NO: 6035, a VHFWR2 amino acid sequence of SEQ ID NO: 6036, a VHFWR3 amino acid sequence of SEQ ID NO: 6037, or a VHFWR4 amino acid sequence of SEQ ID NO: 6038.

[0484] 30. The antibody molecule of embodiment 29, wherein the antigen binding domain comprises a VH comprising the amino acid sequence of SEQ ID NO: 6128 (or an amino acid sequence ha3ving at least about 75%, 80%, 85%, 90%, 95%, or 99% sequence identity to SEQ ID NO: 6128).

[0485] 31. The antibody molecule of any of embodiments 5, 6, or 13-30, wherein the antigen binding domain comprises a light chain variable region (VL) comprising a light chain framework region 1 (VLFWR1) amino acid sequence of SEQ ID NO: 6077 (or a sequence with no more than 1, 2, 3, 4, 5, or 6 mutations, e.g., substitutions, additions, or deletions, therefrom), a VLFWR2 amino acid sequence of SEQ ID NO: 6078 (or a sequence with no more than 1, 2, 3, 4, 5, or 6 mutations, e.g., substitutions, additions, or deletions, therefrom), a VLFWR3 amino acid sequence of SEQ ID NO: 6079 (or a sequence with no more than 1, 2, 3, 4, 5, or 6 mutations, e.g., substitutions, additions, or deletions, therefrom), or a VLFWR4 amino acid sequence of SEQ ID NO: 6080 (or a sequence with no more than 1, 2, 3, 4, 5, or 6 mutations, e.g., substitutions, additions, or deletions, therefrom).

[0486] 32. The antibody molecule of embodiment 31, wherein the antigen binding domain comprises a light chain variable region (VL) comprising a light chain framework region 1 (VLFWR1) amino acid sequence of SEQ ID NO: 6077, a VLFWR2 amino acid sequence of SEQ ID NO: 6078, a VLFWR3 amino acid sequence of SEQ ID NO: 6079, or a VLFWR4 amino acid sequence of SEQ ID NO: 6080.

[0487] 33. The antibody molecule of embodiment 32, wherein the antigen binding domain comprises a VL comprising the amino acid sequence of SEQ ID NO: 6137 (or an amino acid sequence having at least about 93%, 95%, or 99% sequence identity to SEQ ID NO: 6137).

[0488] 34. The antibody molecule of any of embodiments 5, 6, or 13-30, wherein the antigen binding domain comprises a light chain variable region (VL) comprising a light chain framework region 1 (VLFWR1) amino acid sequence of SEQ ID NO: 6081 (or a sequence with no more than 1, 2, 3, 4, 5, or 6 mutations, e.g., substitutions, additions, or deletions, therefrom), a VLFWR2 amino acid sequence of SEQ ID NO: 6082 (or a sequence with no more than 1, 2, 3, 4, 5, or 6 mutations, e.g., substitutions, additions, or deletions, therefrom), a VLFWR3 amino acid sequence of SEQ ID NO: 6083 (or a sequence with no more than 1, 2, 3, 4, 5, or 6 mutations, e.g., substitutions, additions, or deletions, therefrom), or a VLFWR4 amino acid sequence of SEQ ID NO: 6084 (or a sequence with no more than 1, 2, 3, 4, 5, or 6 mutations, e.g., substitutions, additions, or deletions, therefrom).

[0489] 35. The antibody molecule of embodiment 34, wherein the antigen binding domain comprises a light chain variable region (VL) comprising a light chain framework region 1 (VLFWR1) amino acid sequence of SEQ ID NO: 6081, a VLFWR2 amino acid sequence of SEQ ID NO: 6082, a VLFWR3 amino acid sequence of SEQ ID NO: 6083, or a VLFWR4 amino acid sequence of SEQ ID NO: 6084.

[0490] 36. The antibody molecule of embodiment 35, wherein the antigen binding domain comprises a VL comprising the amino acid sequence of SEQ ID NO: 6138 (or an amino acid sequence having at least about 93%, 95%, or 99% sequence identity to SEQ ID NO: 6138).

[0491] 37. The antibody molecule of any of embodiments 5, 6, or 13-30, wherein the antigen binding domain comprises a light chain variable region (VL) comprising a light chain framework region 1 (VLFWR1) amino acid sequence of SEQ ID NO: 6085 (or a sequence with no more than 1, 2, 3, 4, 5, or 6 mutations, e.g., substitutions, additions, or deletions, therefrom), a VLFWR2 amino acid sequence of SEQ ID NO: 6086 (or a sequence with no more than 1, 2, 3, 4, 5, or 6 mutations, e.g., substitutions, additions, or deletions, therefrom), a VLFWR3 amino acid sequence of SEQ ID NO: 6087 (or a sequence with no more than 1, 2, 3, 4, 5, or 6 mutations, e.g., substitutions, additions, or deletions, therefrom), or a VLFWR4 amino acid sequence of SEQ ID NO: 6088 (or a sequence with no more than 1, 2, 3, 4, 5, or 6 mutations, e.g., substitutions, additions, or deletions, therefrom).

[0492] 38. The antibody molecule of embodiment 37, wherein the antigen binding domain comprises a light chain variable region (VL) comprising a light chain framework region 1 (VLFWR1) amino acid sequence of SEQ ID NO: 6085, a VLFWR2 amino acid sequence of SEQ ID NO: 6086, a VLFWR3 amino acid sequence of SEQ ID NO: 6087, or a VLFWR4 amino acid sequence of SEQ ID NO: 6088.

[0493] 39. The antibody molecule of embodiment 38, wherein the antigen binding domain comprises a VL comprising the amino acid sequence of SEQ ID NO: 6139 (or an amino acid sequence having at least about 93%, 95%, or 99% sequence identity to SEQ ID NO: 6139).

[0494] 40. The antibody molecule of any of embodiments 5, 6, or 13-30, wherein the antigen binding domain comprises a light chain variable region (VL) comprising a light chain framework region 1 (VLFWR1) amino acid sequence of SEQ ID NO: 6089 (or a sequence with no more than 1, 2, 3, 4, 5, or 6 mutations, e.g., substitutions, additions, or deletions, therefrom), a VLFWR2 amino acid sequence of SEQ ID NO: 6090 (or a sequence with no more than 1, 2, 3, 4, 5, or 6 mutations, e.g., substitutions, additions, or deletions, therefrom), a VLFWR3 amino acid sequence of SEQ ID NO: 6091 (or a sequence with no more than 1, 2, 3, 4, 5, or 6 mutations, e.g., substitutions, additions, or deletions, therefrom), or a VLFWR4 amino acid sequence of SEQ ID NO: 6092 (or a sequence with no more than 1, 2, 3, 4, 5, or 6 mutations, e.g., substitutions, additions, or deletions, therefrom).

[0495] 41. The antibody molecule of embodiment 40, wherein the antigen binding domain comprises a light chain variable region (VL) comprising a light chain framework region 1 (VLFWR1) amino acid sequence of SEQ ID NO: 6089, a VLFWR2 amino acid sequence of SEQ ID NO: 6090, a VLFWR3 amino acid sequence of SEQ ID NO: 6091, or a VLFWR4 amino acid sequence of SEQ ID NO: 6092.

[0496] 42. The antibody molecule of embodiment 41, wherein the antigen binding domain comprises a VL comprising the amino acid sequence of SEQ ID NO: 6140 (or an amino acid sequence having at least about 93%, 95%, or 99% sequence identity to SEQ ID NO: 6140).

[0497] 43. The antibody molecule of any of embodiments 5, 6, or 13-30, wherein the antigen binding domain comprises a light chain variable region (VL) comprising a light chain framework region 1 (VLFWR1) amino acid sequence of SEQ ID NO: 6093 (or a sequence with no more than 1, 2, 3, 4, 5, or 6 mutations, e.g., substitutions, additions, or deletions, therefrom), a VLFWR2 amino acid sequence of SEQ ID NO: 6094 (or a sequence with no more than 1, 2, 3, 4, 5, or 6 mutations, e.g., substitutions, additions, or deletions, therefrom), a VLFWR3 amino acid sequence of SEQ ID NO: 6095 (or a sequence with no more than 1, 2, 3, 4, 5, or 6 mutations, e.g., substitutions, additions, or deletions, therefrom), or a VLFWR4 amino acid sequence of SEQ ID NO: 6096 (or a sequence with no more than 1, 2, 3, 4, 5, or 6 mutations, e.g., substitutions, additions, or deletions, therefrom).

[0498] 44. The antibody molecule of embodiment 43, wherein the antigen binding domain comprises a light chain variable region (VL) comprising a light chain framework region 1 (VLFWR1) amino acid sequence of SEQ ID NO: 6093, a VLFWR2 amino acid sequence of SEQ ID NO: 6094, a VLFWR3 amino acid sequence of SEQ ID NO: 6095, or a VLFWR4 amino acid sequence of SEQ ID NO: 6096.

[0499] 45. The antibody molecule of embodiment 44, wherein the antigen binding domain comprises a VL comprising the amino acid sequence of SEQ ID NO: 6141 (or an amino acid sequence having at least about 93%, 95%, or 99% sequence identity to SEQ ID NO: 6141).

[0500] 46. An isolated antibody molecule that binds to NKp30, comprising:
[0501] (i) a heavy chain variable region (VH) comprising a heavy chain complementarity determining region 1 (VHCDR1) amino acid sequence of SEQ ID NO: 6007 (or a sequence with no more than 1, 2, 3, or 4 mutations, e.g., substitutions, additions, or deletions), a VHCDR2 amino acid sequence of SEQ ID NO: 6008 (or a sequence with no more than 1, 2, 3, or 4 mutations, e.g., substitutions, additions, or deletions), and/or a VHCDR3 amino acid sequence of SEQ ID NO: 6009 (or a sequence with no more than 1, 2, 3, or 4 mutations, e.g., substitutions, additions, or deletions), and
[0502] (ii) a light chain variable region (VL) comprising a light chain complementarity determining region 1 (VLCDR1) amino acid sequence of SEQ ID NO: 6070 (or a sequence with no more than 1, 2, 3, or 4 mutations, e.g., substitutions, additions, or deletions), a VLCDR2 amino acid sequence of SEQ ID NO: 6071 (or a sequence with no more than 1, 2, 3, or 4 mutations, e.g., substitutions, additions, or deletions), and/or a VLCDR3 amino acid sequence of SEQ ID NO: 6072 (or a sequence with no more than 1, 2, 3, or 4 mutations, e.g., substitutions, additions, or deletions).

[0503] 47. The antibody molecule of embodiment 46, wherein the antigen binding domain comprises:
[0504] (i) a heavy chain variable region (VH) comprising a heavy chain complementarity determining region 1 (VHCDR1) amino acid sequence of SEQ ID NO: 6007, a VHCDR2 amino acid sequence of SEQ ID NO: 6008, and/or a VHCDR3 amino acid sequence of SEQ ID NO: 6009, and
[0505] (ii) a light chain variable region (VL) comprising a light chain complementarity determining region 1 (VLCDR1) amino acid sequence of SEQ ID NO: 6070, a VLCDR2 amino acid sequence of SEQ ID NO: 6071, and/or a VLCDR3 amino acid sequence of SEQ ID NO: 6072.

[0506] 48. The antibody molecule of embodiments 46 or 47, wherein the antigen binding domain comprises:
[0507] (1) a heavy chain variable region (VH) comprising a heavy chain framework region 1 (VHFWR1) amino acid sequence of SEQ ID NO: 6010 (or a sequence with no more than 1, 2, 3, 4, 5, or 6 mutations, e.g., substitutions, additions, or deletions, therefrom), a VHFWR2 amino acid sequence of SEQ ID NO: 6011 (or a sequence with no more than 1, 2, 3, 4, 5, or 6 mutations, e.g., substitutions, additions, or deletions, therefrom), a VHFWR3 amino acid sequence of SEQ ID NO: 6012 (or a sequence with no more than 1, 2, 3, 4, 5, or 6 mutations, e.g., substitutions, additions, or deletions, therefrom), or a VHFWR4 amino acid sequence of SEQ ID NO: 6013 (or a sequence with no more than 1, 2, 3, 4, 5, or 6 mutations, e.g., substitutions, additions, or deletions, therefrom), and/or
[0508] (2) a light chain variable region (VL) comprising a light chain framework region 1 (VLFWR1) amino acid sequence of SEQ ID NO: 6073 (or a sequence with no more than 1, 2, 3, 4, 5, or 6 mutations, e.g., substitutions, additions, or deletions, therefrom), a VLFWR2 amino acid sequence of SEQ ID NO: 6074 (or a sequence with no more than 1, 2, 3, 4, 5, or 6 mutations, e.g., substitutions, additions, or deletions, therefrom), a VLFWR3 amino acid sequence of SEQ ID NO: 6075 (or a sequence with no more than 1, 2, 3, 4, 5, or 6 mutations, e.g., substitutions, additions, or deletions, therefrom), or a VLFWR4 amino acid sequence of SEQ ID NO: 6076 (or a sequence with no more than 1, 2, 3, 4, 5, or 6 mutations, e.g., substitutions, additions, or deletions, therefrom).

[0509] 49. The antibody molecule of embodiment 48, wherein the antigen binding domain comprises:
[0510] (1) a heavy chain variable region (VH) comprising a heavy chain framework region (VHFWR1) amino acid sequence of SEQ ID NO: 6010, a VHFWR2 amino acid sequence of SEQ ID NO: 6011, a VHFWR3 amino acid sequence of SEQ ID NO: 6012, or a VHFWR4 amino acid sequence of SEQ ID NO: 6013, and
[0511] (3) a light chain variable region (VL) comprising a light chain framework region 1 (VLFWR1) amino acid sequence of SEQ ID NO: 6073, a VLFWR2 amino acid sequence of SEQ ID NO: 6074, a VLFWRamino acid sequence of SEQ ID NO: 6075, or a VLFWR4 amino acid sequence of SEQ ID NO: 6076.

[0512] 50. The antibody molecule of any one of embodiments 46-49, wherein the antigen binding domain comprises:
[0513] (i) a VH comprising the amino acid sequence of SEQ ID NO: 6122 (or an amino acid sequence having at least about 75%, 80%, 85%, 90%, 95%, or 99% sequence identity to SEQ ID NO: 6122), and/or
[0514] (ii) a VL comprising the amino acid sequence of SEQ ID NO: 6136 (or an amino acid sequence having at least about 93%, 95%, or 99% sequence identity to SEQ ID NO: 6136).

[0515] 51. The antibody molecule of any of embodiments 46-50, wherein the antigen binding domain comprises a heavy chain comprising the amino acid sequence of SEQ ID NOs: 6151 or 6152 (or an amino acid sequence having at least about 75%, 80%, 85%, 90%, 95%, or 99% sequence identity to SEQ ID NOs: 6151 or 6152).

[0516] 52. The antibody molecule of any of embodiments 46-51, wherein the antigen binding domain comprises a light chain comprising the amino acid sequence of SEQ ID NO: 6153 (or an amino acid sequence having at least about 75%, 80%, 85%, 90%, 95%, or 99% sequence identity to SEQ ID NO: 6153).

[0517] 53. The antibody molecule of any of embodiments 46-51, wherein the antigen binding domain comprises a heavy chain comprising the amino acid sequence of SEQ ID NOs: 6151 or 6152 (or an amino acid sequence having at least about 75%, 80%, 85%, 90%, 95%, or 99% sequence identity to SEQ ID NOs: 6151 or 6152), and a light chain comprising the amino acid sequence of SEQ ID NO: 6153 (or an amino acid sequence having at least about 75%, 80%, 85%, 90%, 95%, or 99% sequence identity to SEQ ID NO: 6153).

[0518] 54. The antibody molecule of embodiments 46 or 47, wherein the antigen binding domain comprises a heavy chain variable region (VH) comprising a heavy chain framework region 1 (VHFWR1) amino acid sequence of SEQ ID NO: 6039 (or a sequence with no more than 1, 2, 3, 4, 5, or 6 mutations, e.g., substitutions, additions, or deletions, therefrom), a VHFWR2 amino acid sequence of SEQ ID NO: 6040 (or a sequence with no more than 1, 2, 3, 4, 5, or 6 mutations, e.g., substitutions, additions, or deletions, therefrom), a VHFWR3 amino acid sequence of SEQ ID NO: 6041 (or a sequence with no more than 1, 2, 3, 4, 5, or 6 mutations, e.g., substitutions, additions, or deletions, therefrom), or a VHFWR4 amino acid sequence of SEQ ID NO: 6042 (or a sequence with no more than 1, 2, 3, 4, 5, or 6 mutations, e.g., substitutions, additions, or deletions, therefrom).

[0519] 55. The antibody molecule of embodiment 54, wherein the antigen binding domain comprises a heavy chain variable region (VH) comprising a heavy chain framework region 1 (VHFWR1) amino acid sequence of SEQ ID NO: 6039, a VHFWR2 amino acid sequence of SEQ ID NO: 6040, a VHFWR3 amino acid sequence of SEQ ID NO: 6041, or a VHFWR4 amino acid sequence of SEQ ID NO: 6042.

[0520] 56. The antibody molecule of embodiment 55, wherein the antigen binding domain comprises a VH comprising the amino acid sequence of SEQ ID NO: 6129 (or an amino acid sequence having at least about 75%, 80%, 85%, 90%, 95%, or 99% sequence identity to SEQ ID NO: 6129).

[0521] 57. The antibody molecule of embodiments 46 or 47, wherein the antigen binding domain comprises a heavy chain variable region (VH) comprising a heavy chain framework region 1 (VHFWR1) amino acid sequence of SEQ ID NO: 6043 (or a sequence with no more than 1, 2, 3, 4, 5, or 6 mutations, e.g., substitutions, additions, or deletions, therefrom), a VHFWR2 amino acid sequence of SEQ ID NO: 6044 (or a sequence with no more than 1, 2, 3, 4, 5, or 6 mutations, e.g., substitutions, additions, or deletions, therefrom), a VHFWR3 amino acid sequence of SEQ ID NO: 6045 (or a sequence with no more than 1, 2, 3, 4, 5, or 6 mutations, e.g., substitutions, additions, or deletions, therefrom), or a VHFWR4 amino acid sequence of SEQ ID NO: 6046 (or a sequence with no more than 1, 2, 3, 4, 5, or 6 mutations, e.g., substitutions, additions, or deletions, therefrom).

[0522] 58. The antibody molecule of embodiment 57, wherein the antigen binding domain comprises a heavy chain variable region (VH) comprising a heavy chain framework region 1 (VHFWR1) amino acid sequence of SEQ ID NO: 6043, a VHFWR2 amino acid sequence of SEQ ID NO: 6044, a VHFWR3 amino acid sequence of SEQ ID NO: 6045, or a VHFWR4 amino acid sequence of SEQ ID NO: 6046.

[0523] 59. The antibody molecule of embodiment 58, wherein the antigen binding domain comprises a VH comprising the amino acid sequence of SEQ ID NO: 6130 (or an amino acid sequence having at least about 75%, 80%, 85%, 90%, 95%, or 99% sequence identity to SEQ ID NO: 6130).

[0524] 60. The antibody molecule of any of embodiments 46 or 47, wherein the antigen binding domain comprises a heavy chain variable region (VH) comprising a heavy chain framework region 1 (VHFWR1) amino acid sequence of SEQ ID NO: 6047 (or a sequence with no more than 1, 2, 3, 4, 5, or 6 mutations, e.g., substitutions, additions, or deletions, therefrom), a VHFWR2 amino acid sequence of SEQ ID NO: 6048 (or a sequence with no more than 1, 2, 3, 4, 5, or 6 mutations, e.g., substitutions, additions, or deletions, therefrom), a VHFWR3 amino acid sequence of SEQ ID NO: 6049 (or a sequence with no more than 1, 2, 3, 4, 5, or 6 mutations, e.g., substitutions, additions, or deletions, therefrom), or a VHFWR4 amino acid sequence of SEQ ID NO: 6050 (or a sequence with no more than 1, 2, 3, 4, 5, or 6 mutations, e.g., substitutions, additions, or deletions, therefrom).

[0525] 61. The antibody molecule of embodiment 60, wherein the antigen binding domain comprises a heavy chain variable region (VH) comprising a heavy chain framework region 1 (VHFWR1) amino acid sequence of SEQ ID NO: 6047, a VHFWR2 amino acid sequence of SEQ ID NO: 6048, a VHFWR3 amino acid sequence of SEQ ID NO: 6049, or a VHFWR4 amino acid sequence of SEQ ID NO: 6050.

[0526] 62. The antibody molecule of embodiment 61, wherein the antigen binding domain comprises a VH comprising the amino acid sequence of SEQ ID NO: 6131 (or an amino acid sequence having at least about 75%, 80%, 85%, 90%, 95%, or 99% sequence identity to SEQ ID NO: 6131).

[0527] 63. The antibody molecule of any of embodiments 46 or 47, wherein the antigen binding domain comprises a heavy chain variable region (VH) comprising a heavy chain framework region 1 (VHFWR1) amino acid sequence of SEQ ID NO: 6051 (or a sequence with no more than 1, 2, 3, 4, 5, or 6 mutations, e.g., substitutions, additions, or deletions, therefrom), a VHFWR2 amino acid sequence of SEQ ID NO: 6052 (or a sequence with no more than 1, 2, 3, 4, 5, or 6 mutations, e.g., substitutions, additions, or deletions, therefrom), a VHFWR3 amino acid sequence of SEQ ID NO: 6053 (or a sequence with no more than 1, 2, 3, 4, 5, or 6 mutations, e.g., substitutions, additions, or deletions, therefrom), or a VHFWR4 amino acid sequence of SEQ ID NO: 6054 (or a sequence with no more than 1, 2, 3, 4, 5, or 6 mutations, e.g., substitutions, additions, or deletions, therefrom).

[0528] 64. The antibody molecule of embodiment 63, wherein the antigen binding domain comprises a heavy chain variable region (VH) comprising a heavy chain framework region 1 (VHFWR1) amino acid sequence of SEQ ID NO: 6051, a VHFWR2 amino acid sequence of SEQ ID NO: 6052, a VHFWR3 amino acid sequence of SEQ ID NO: 6053, or a VHFWR4 amino acid sequence of SEQ ID NO: 6054.

[0529] 65. The antibody molecule of embodiment 64, wherein the antigen binding domain comprises a VH comprising the amino acid sequence of SEQ ID NO: 6132 (or an amino acid sequence having at least about 75%, 80%, 85%, 90%, 95%, or 99% sequence identity to SEQ ID NO: 6132).

[0530] 66. The antibody molecule of any of embodiments 46 or 47, wherein the antigen binding domain comprises a heavy chain variable region (VH) comprising a heavy chain framework region 1 (VHFWR1) amino acid sequence of SEQ ID NO: 6055 (or a sequence with no more than 1, 2, 3, 4, 5, or 6 mutations, e.g., substitutions, additions, or deletions, therefrom), a VHFWR2 amino acid sequence of SEQ ID NO: 6056 (or a sequence with no more than 1, 2, 3, 4, 5, or 6 mutations, e.g., substitutions, additions, or deletions, therefrom), a VHFWR3 amino acid sequence of SEQ ID NO: 6057 (or a sequence with no more than 1, 2, 3, 4, 5, or 6 mutations, e.g., substitutions, additions, or deletions, therefrom), or a VHFWR4 amino acid sequence of SEQ ID NO: 6058 (or a sequence with no more than 1, 2, 3, 4, 5, or 6 mutations, e.g., substitutions, additions, or deletions, therefrom).

[0531] 67. The antibody molecule of embodiment 66, wherein the antigen binding domain comprises a heavy chain variable region (VH) comprising a heavy chain framework region 1 (VHFWR1) amino acid sequence of SEQ ID NO: 6055, a VHFWR2 amino acid sequence of SEQ ID NO: 6056, a VHFWR3 amino acid sequence of SEQ ID NO: 6057, or a VHFWR4 amino acid sequence of SEQ ID NO: 6058.

[0532] 68. The antibody molecule of embodiment 67, wherein the antigen binding domain comprises a VH comprising the amino acid sequence of SEQ ID NO: 6133 (or an amino acid sequence having at least about 75%, 80%, 85%, 90%, 95%, or 99% sequence identity to SEQ ID NO: 6133).

[0533] 69. The antibody molecule of any of embodiments 46 or 47, wherein the antigen binding domain comprises a heavy chain variable region (VH) comprising a heavy chain framework region 1 (VHFWR1) amino acid sequence of SEQ ID NO: 6059 (or a sequence with no more than 1, 2, 3, 4, 5, or 6 mutations, e.g., substitutions, additions, or deletions, therefrom), a VHFWR2 amino acid sequence of SEQ ID NO: 6060 (or a sequence with no more than 1, 2, 3, 4, 5, or 6 mutations, e.g., substitutions, additions, or deletions, therefrom), a VHFWR3 amino acid sequence of SEQ ID NO: 6061 (or a sequence with no more than 1, 2, 3, 4, 5, or 6 mutations, e.g., substitutions, additions, or deletions, therefrom), or a VHFWR4 amino acid sequence of SEQ ID NO: 6062 (or a sequence with no more than 1, 2, 3, 4, 5, or 6 mutations, e.g., substitutions, additions, or deletions, therefrom).

[0534] 70. The antibody molecule of embodiment 69, wherein the antigen binding domain comprises a heavy chain variable region (VH) comprising a heavy chain framework region 1 (VHFWR1) amino acid sequence of SEQ ID NO: 6059, a VHFWR2 amino acid sequence of SEQ ID NO: 6060, a VHFWR3 amino acid sequence of SEQ ID NO: 6061, or a VHFWR4 amino acid sequence of SEQ ID NO: 6062.

[0535] 71. The antibody molecule of embodiment 70, wherein the antigen binding domain comprises a VH comprising the amino acid sequence of SEQ ID NO: 6134 (or an amino acid sequence having at least about 75%, 80%, 85%, 90%, 95%, or 99% sequence identity to SEQ ID NO: 6134).

[0536] 72. The antibody molecule of any of embodiments 46, 47, or 54-71, wherein the antigen binding domain comprises a light chain variable region (VL) comprising a light chain framework region 1 (VLFWR1) amino acid sequence of SEQ ID NO: 6097 (or a sequence with no more than 1, 2, 3, 4, 5, or 6 mutations, e.g., substitutions, additions, or deletions, therefrom), a VLFWR2 amino acid sequence of SEQ ID NO: 6098 (or a sequence with no more than 1, 2, 3, 4, 5, or 6 mutations, e.g., substitutions, additions, or deletions, therefrom), a VLFWR3 amino acid sequence of SEQ ID NO: 6099 (or a sequence with no more than 1, 2, 3, 4, 5, or 6 mutations, e.g., substitutions, additions, or deletions, therefrom), or a VLFWR4 amino acid sequence of SEQ ID NO: 6100 (or a sequence with no more than 1, 2, 3, 4, 5, or 6 mutations, e.g., substitutions, additions, or deletions, therefrom).

[0537] 73. The antibody molecule of embodiment 72, wherein the antigen binding domain comprises a light chain variable region (VL) comprising a light chain framework region 1 (VLFWR1) amino acid sequence of SEQ ID NO: 6097, a VLFWR2 amino acid sequence of SEQ ID NO: 6098, a VLFWR3 amino acid sequence of SEQ ID NO: 6099, or a VLFWR4 amino acid sequence of SEQ ID NO: 6100.

[0538] 74. The antibody molecule of embodiment 73, wherein the antigen binding domain comprises a VL comprising the amino acid sequence of SEQ ID NO: 6142 (or an amino acid sequence having at least about 93%, 95%, or 99% sequence identity to SEQ ID NO: 6142).

[0539] 75. The antibody molecule of any of embodiments 46, 47, or 54-74, wherein the antigen binding domain comprises a light chain variable region (VL) comprising a light chain framework region 1 (VLFWR1) amino acid sequence of SEQ ID NO: 6101 (or a sequence with no more than 1, 2, 3, 4, 5, or 6 mutations, e.g., substitutions, additions, or deletions, therefrom), a VLFWR2 amino acid sequence of SEQ ID NO: 6102 (or a sequence with no more than 1, 2, 3, 4, 5, or 6 mutations, e.g., substitutions, additions, or deletions, therefrom), a VLFWR3 amino acid sequence of SEQ ID NO: 6103 (or a sequence with no more than 1, 2, 3, 4, 5, or 6 mutations, e.g., substitutions, additions, or deletions, therefrom), or a VLFWR4 amino acid sequence of SEQ ID NO: 6104 (or a sequence with no more than 1, 2, 3, 4, 5, or 6 mutations, e.g., substitutions, additions, or deletions, therefrom).

[0540] 76. The antibody molecule of embodiment 75, wherein the antigen binding domain comprises a light chain variable region (VL) comprising a light chain framework region 1 (VLFWR1) amino acid sequence of SEQ ID NO: 6101, a VLFWR2 amino acid sequence of SEQ ID NO: 6102, a VLFWR3 amino acid sequence of SEQ ID NO: 6103, or a VLFWR4 amino acid sequence of SEQ ID NO: 6104.

[0541] 77. The antibody molecule of embodiment 76, wherein the antigen binding domain comprises a VL comprising the amino acid sequence of SEQ ID NO: 6143 (or an amino acid sequence having at least about 93%, 95%, or 99% sequence identity to SEQ ID NO: 6143).

[0542] 78. The antibody molecule of any of embodiments 46, 47, or 54-77, wherein the antigen binding domain comprises a light chain variable region (VL) comprising a light chain framework region 1 (VLFWR1) amino acid sequence of SEQ ID NO: 6105 (or a sequence with no more than 1, 2, 3, 4, 5, or 6 mutations, e.g., substitutions, additions, or deletions, therefrom), a VLFWR2 amino acid sequence of SEQ ID NO: 6106 (or a sequence with no more than 1, 2, 3, 4, 5, or 6 mutations, e.g., substitutions, additions, or deletions, therefrom), a VLFWR3 amino acid sequence of SEQ ID NO: 6107 (or a sequence with no more than 1, 2, 3, 4, 5, or 6 mutations, e.g., substitutions, additions, or deletions, therefrom), or a VLFWR4 amino acid sequence of SEQ ID NO: 6108 (or a sequence with no more than 1, 2, 3, 4, 5, or 6 mutations, e.g., substitutions, additions, or deletions, therefrom).

[0543] 79. The antibody molecule of embodiment 78, wherein the antigen binding domain comprises a light chain variable region (VL) comprising a light chain framework region 1 (VLFWR1) amino acid sequence of SEQ ID NO: 6105, a VLFWR2 amino acid sequence of SEQ ID NO: 6106, a VLFWR3 amino acid sequence of SEQ ID NO: 6107, or a VLFWR4 amino acid sequence of SEQ ID NO: 6108.

[0544] 80. The antibody molecule of embodiment 79, wherein the antigen binding domain comprises a VL comprising the amino acid sequence of SEQ ID NO: 6144 (or an amino acid sequence having at least about 93%, 95%, or 99% sequence identity to SEQ ID NO: 6144).

[0545] 81. The antibody molecule of any of embodiments 46, 47, or 54-80, wherein the antigen binding domain comprises a light chain variable region (VL) comprising a light chain framework region 1 (VLFWR1) amino acid sequence of SEQ ID NO: 6109 (or a sequence with no more than 1, 2, 3, 4, 5, or 6 mutations, e.g., substitutions, additions, or deletions, therefrom), a VLFWR2 amino acid sequence of SEQ ID NO: 6110 (or a sequence with no more than 1, 2, 3, 4, 5, or 6 mutations, e.g., substitutions, additions, or deletions, therefrom), a VLFWR3 amino acid sequence of SEQ ID NO: 6111 (or a sequence with no more than 1, 2, 3, 4, 5, or 6 mutations, e.g., substitutions, additions, or deletions, therefrom), or a VLFWR4 amino acid sequence of SEQ ID NO: 6112 (or a sequence with no more than 1, 2, 3, 4, 5, or 6 mutations, e.g., substitutions, additions, or deletions, therefrom).

[0546] 82. The antibody molecule of embodiment 81, wherein the antigen binding domain comprises a light chain variable region (VL) comprising a light chain framework region 1 (VLFWR1) amino acid sequence of SEQ ID NO: 6109, a VLFWR2 amino acid sequence of SEQ ID NO: 6110, a VLFWR3 amino acid sequence of SEQ ID NO: 6111, or a VLFWR4 amino acid sequence of SEQ ID NO: 6112.

[0547] 83. The antibody molecule of embodiment 78, wherein the antigen binding domain comprises a VL comprising the amino acid sequence of SEQ ID NO: 6145 (or an amino acid sequence having at least about 93%, 95%, or 99% sequence identity to SEQ ID NO: 6145).

[0548] 84. The antibody molecule of any of embodiments 46, 47, or 54-83, wherein the antigen binding domain comprises a light chain variable region (VL) comprising a light chain framework region 1 (VLFWR1) amino acid sequence of SEQ ID NO: 6113 (or a sequence with no more than 1, 2, 3, 4, 5, or 6 mutations, e.g., substitutions, additions, or deletions, therefrom), a VLFWR2 amino acid sequence of SEQ ID NO: 6114 (or a sequence with no more than 1, 2, 3, 4, 5, or 6 mutations, e.g., substitutions, additions, or deletions, therefrom), a VLFWR3 amino acid sequence of SEQ ID NO: 6115 (or a sequence with no more than 1, 2, 3, 4, 5, or 6 mutations, e.g., substitutions, additions, or deletions, therefrom), or a VLFWR4 amino acid sequence of SEQ ID NO: 6116 (or a sequence with no more than 1, 2, 3, 4, 5, or 6 mutations, e.g., substitutions, additions, or deletions, therefrom).

[0549] 85. The antibody molecule of embodiment 84, wherein the antigen binding domain comprises a light chain variable region (VL) comprising a light chain framework region 1 (VLFWR1) amino acid sequence of SEQ ID NO: 6113, a VLFWR2 amino acid sequence of SEQ ID NO: 6114, a VLFWR3 amino acid sequence of SEQ ID NO: 6115, or a VLFWR4 amino acid sequence of SEQ ID NO: 6116.

[0550] 86. The antibody molecule of embodiment 85, wherein the antigen binding domain comprises a VL comprising the amino acid sequence of SEQ ID NO: 6146 (or an amino acid sequence having at least about 93%, 95%, or 99% sequence identity to SEQ ID NO: 6146).

[0551] 87. The antibody molecule of any of embodiments 46, 47, or 54-86, wherein the antigen binding domain comprises a light chain variable region (VL) comprising a light chain framework region 1 (VLFWR1) amino acid sequence of SEQ ID NO: 6117 (or a sequence with no more than 1, 2, 3, 4, 5, or 6 mutations, e.g., substitutions, additions, or deletions, therefrom), a VLFWR2 amino acid sequence of SEQ ID NO: 6118 (or a sequence with no more than 1, 2, 3, 4, 5, or 6 mutations, e.g., substitutions, additions, or deletions, therefrom), a VLFWR3 amino acid sequence of SEQ ID NO: 6119 (or a sequence with no more than 1, 2, 3, 4, 5, or 6 mutations, e.g., substitutions, additions, or deletions, therefrom), or a VLFWR4 amino acid sequence of SEQ ID NO: 6120 (or a sequence with no more than 1, 2, 3, 4, 5, or 6 mutations, e.g., substitutions, additions, or deletions, therefrom).

[0552] 88. The antibody molecule of embodiment 87, wherein the antigen binding domain comprises a light chain variable region (VL) comprising a light chain framework region 1 (VLFWR1) amino acid sequence of SEQ ID NO: 6117, a VLFWR2 amino acid sequence of SEQ ID NO: 6118, a VLFWR3 amino acid sequence of SEQ ID NO: 6119, or a VLFWR4 amino acid sequence of SEQ ID NO: 6120.

[0553] 89. The antibody molecule of embodiment 88, wherein the antigen binding domain comprises a VL comprising the amino acid sequence of SEQ ID NO: 6147 (or an amino acid sequence having at least about 93%, 95%, or 99% sequence identity to SEQ ID NO: 6147).

[0554] 90. The antibody molecule of any one of the preceding embodiments, wherein the antigen binding domain comprises:
[0555] (i) a VH comprising the amino acid sequence of SEQ ID NO: 6122 (or an amino acid sequence having at least about 75%, 80%, 85%, 90%, 95%, or 99% sequence identity to SEQ ID NO: 6122), and/or
[0556] (ii) a VL comprising the amino acid sequence of SEQ ID NO: 6136 (or an amino acid sequence having at least about 93%, 95%, or 99% sequence identity to SEQ ID NO: 6136).

[0557] 91. A multispecific molecule comprising the antibody molecule of any of embodiments 1-90.

[0558] 92. The multispecific molecule of embodiment 91, further comprising one, two, three, four or more of:
[0559] a. a tumor targeting moiety, e.g., as described herein;
[0560] b. a cytokine molecule, e.g., as described herein;
[0561] c. a T cell engager, e.g., as described herein; or
[0562] d. a stromal modifying moiety, e.g., as described herein.

[0563] 93. The multispecific molecule of embodiment 91, further comprising a binding specificity that binds to an autoreactive T cell, e.g., an antigen present on the surface of an autoreactive T cell that is associated with the inflammatory or autoimmune disorder.

[0564] 94. The multispecific molecule of embodiment 91, further comprising a binding specificity that binds to an infected cell, e.g., a viral or bacterial infected cell.

[0565] 95. The antibody molecule, or the multispecific molecule of any of the preceding embodiments, which is a monospecific antibody molecule, a bispecific antibody molecule, or a trispecific antibody molecule.

[0566] 96. The antibody molecule, or the multispecific molecule of any of the preceding embodiments, which is a monovalent antibody molecule, a bivalent antibody molecule, or a trivalent antibody molecule.

[0567] 97. The antibody molecule, or the multispecific molecule of any of the preceding embodiments, which is a full antibody (e.g., an antibody that includes at least one, and preferably two, complete heavy chains, and at least one, and preferably two, complete light chains), or an antigen-binding fragment (e.g., a Fab, F(ab′)₂, Fv, a single chain Fv, a single domain antibody, a diabody (dAb), a bivalent antibody, or bispecific antibody or fragment thereof, a single domain variant thereof, or a camelid antibody).

[0568] 98. The antibody molecule, or the multispecific molecule of any of the preceding embodiments, which comprises a heavy chain constant region chosen from IgG1, IgG2, IgG3, or IgG4, or a fragment thereof.

[0569] 99. The antibody molecule, or the multispecific molecule of any of the preceding embodiments, which comprises a light chain constant region chosen from the light chain constant regions of kappa or lambda, or a fragment thereof.

[0570] 100. The antibody molecule, or the multispecific molecule of any of the preceding embodiments, wherein the immunoglobulin chain constant region (e.g., Fc region) is altered, e.g., mutated, to increase or decrease one or more of: Fc receptor binding, antibody glycosylation, the number of cysteine residues, effector cell function, or complement function.

[0571] 101. The antibody molecule, or the multispecific molecule of any of the preceding embodiments, wherein an interface of a first and second immunoglobulin chain constant regions (e.g., Fc region) is altered, e.g., mutated, to increase or decrease dimerization, e.g., relative to a non-engineered interface.

[0572] 102. The antibody molecule or the multispecific molecule of embodiment 101, wherein the dimerization of the immunoglobulin chain constant region (e.g., Fc region) is enhanced by providing an Fc interface of a first and a second Fc region with one or more of: a paired cavity-protuberance (“knob-in-a hole”), an electrostatic interaction, or a strand-exchange, such that a greater ratio of heteromultimer:homomultimer forms, e.g., relative to a non-engineered interface.

[0573] 103. The antibody molecule or the multispecific molecule of embodiment 101 or 102, wherein the immunoglobulin chain constant region (e.g., Fc region) comprises an amino acid substitution at a position chosen from one or more of 347, 349, 350, 351, 366, 368, 370, 392, 394, 395, 397, 398, 399, 405, 407, or 409, e.g., of the Fc region of human IgG1.

[0574] 104. The antibody molecule or the multispecific molecule of embodiment 103, wherein the immunoglobulin chain constant region (e.g., Fc region) comprises an amino acid substitution chosen from: T366S, L368A, or Y407V (e.g., corresponding to a cavity or hole), or T366W (e.g., corresponding to a protuberance or knob), or a combination thereof.

[0575] 105. The antibody molecule or the multispecific molecule of any of embodiments 1-104, further comprising a linker, e.g., a linker between one or more of: the targeting moiety and the cytokine molecule or the stromal modifying moiety, the targeting moiety and the immune cell engager, the cytokine molecule or the stromal modifying moiety, and the immune cell engager, the cytokine molecule or the stromal modifying moiety and the immunoglobulin chain constant region (e.g., the Fc region), the targeting moiety and the immunoglobulin chain constant region, or the immune cell engager and the immunoglobulin chain constant region.

[0576] 106. The antibody molecule or the multispecific molecule of embodiment 105, wherein the linker is selected from: a cleavable linker, a non-cleavable linker, a peptide linker, a flexible linker, a rigid linker, a helical linker, or a non-helical linker.

[0577] 107. The antibody molecule or the multispecific molecule of embodiment 106, wherein the linker is a peptide linker.

[0578] 108. The antibody molecule or the multispecific molecule of embodiment 107, wherein the peptide linker comprises Gly and Ser.

[0579] 109. An isolated nucleic acid molecule, which comprises the nucleotide sequence encoding any of the antibody molecules or multispecific or multifunctional molecules described herein, or a nucleotide sequence substantially homologous thereto (e.g., at least 95% to 99.9% identical thereto).

[0580] 110. An isolated nucleic acid encoding the antibody molecule or the multispecific molecule of any of embodiments 1-108.

[0581] 111. A vector, e.g., an expression vector, comprising one or more of the nucleic acid molecules of any of embodiments 109 or 110.

[0582] 112. A host cell comprising the nucleic acid molecule or the vector of embodiment 111.

[0583] 113. A method of making, e.g., producing, the antibody molecule or the multispecific or multifunctional molecule polypeptide of any of embodiments 1-108, comprising culturing the host cell of embodiment 112, under suitable conditions, e.g., conditions suitable for gene expression and/or homo- or heterodimerization.

[0584] 114. A pharmaceutical composition comprising the antibody molecule or the multispecific or multifunctional molecule polypeptide of any of embodiments 1-108 and a pharmaceutically acceptable carrier, excipient, or stabilizer.

[0585] 115. A method of treating a cancer, comprising administering to a subject in need thereof the antibody molecule or the multispecific or multifunctional molecule polypeptide of any of the preceding embodiments, wherein the multispecific antibody is administered in an amount effective to treat the cancer.

[0586] 116. The antibody molecule or the multispecific or multifunctional molecule polypeptide of any of the preceding embodiments for use in treating cancer.

[0587] 117. The method of embodiment 115 or the use of embodiment 116, wherein the cancer is a solid tumor cancer, or a metastatic lesion.

[0588] 118. The method of embodiment 117 or the use of embodiment 117, wherein the solid tumor cancer is one or more of pancreatic (e.g., pancreatic adenocarcinoma), breast, colorectal, lung (e.g., small or non-small cell lung cancer), skin, ovarian, or liver cancer.

[0589] 119. The method of embodiment 115 or the use of embodiment 116, wherein the cancer is a hematological cancer.

[0590] 120. The method of any of embodiments 115 or 116-119 or the use of any of embodiments 116-119, further comprising administering a second therapeutic treatment.

[0591] 121. The method of embodiment 120 or the use of embodiment 120, wherein the second therapeutic treatment comprises a therapeutic agent (e.g., a chemotherapeutic agent, a biologic agent, hormonal therapy), radiation, or surgery.

[0592] 122. The method of embodiment 121 or the use of embodiment 121, wherein the therapeutic agent is selected from: a chemotherapeutic agent, or a biologic agent.

[0593] 123. A method of treating an autoimmune or an inflammatory disorder, comprising administering to a subject in need thereof the antibody molecule or the multispecific or multifunctional molecule polypeptide of any of the preceding embodiments, wherein the multispecific antibody is administered in an amount effective to treat the autoimmune or the inflammatory disorder.

[0594] 124. The antibody molecule or the multispecific or multifunctional molecule polypeptide of any of the preceding embodiments for use in treating an autoimmune or an inflammatory disorder.

[0595] 125. A method of treating an infectious disorder, comprising administering to a subject in need thereof the antibody molecule or the multispecific or multifunctional molecule polypeptide of any of the preceding embodiments, wherein the multispecific antibody is administered in an amount effective to treat the infectious disorder.

[0596] 126. The antibody molecule or the multispecific or multifunctional molecule polypeptide of any of the preceding embodiments for use in treating an infectious disorder.

### Exemplary Embodiment 3

[0597] 1. An isolated antibody molecule that binds to NKp30, comprising:
[0598] (a) a heavy chain complementarity determining region 1 (VHCDR1), a heavy chain complementarity determining region 2 (VHCDR2), and/or a heavy chain complementarity determining region 3 (VHCDR3) described in Table 8A, or a sequence with no more than 1, 2, 3, or 4 mutations, e.g., substitutions, additions, or deletions; and/or
[0599] (b) a light chain complementarity determining region 1 (VLCDR1), a light chain complementarity determining region 2 (VLCDR2), and/or a light chain complementarity determining region 3 (VLCDR3) described in Table 8B, or a sequence with no more than 1, 2, 3, or 4 mutations, e.g., substitutions, additions, or deletions.

[0600] 2. The antibody molecule of embodiment 1, wherein the VHCDR1 comprises the amino acid sequence of any of SEQ ID NOs: 19, 33, 47, 61, 7397, 89, 103, or 116, or an amino acid sequence with no more than 1, 2, 3, or 4 mutations, e.g., substitutions, additions, or deletions.

[0601] 3. The antibody molecule of embodiment 1 or 2, wherein the VHCDR2 comprises the amino acid sequence of any of SEQ ID NOs: 21, 35, 49, 63, 7399, 91, 105, or 118, or an amino acid sequence with no more than 1, 2, 3, or 4 mutations, e.g., substitutions, additions, or deletions.

[0602] 4. The antibody molecule of any of embodiments 1-3, wherein the VHCDR3 comprises the amino acid sequence of any of SEQ ID NOs: 23, 37, 51, 65, 79, 93, 107, or 120, or an amino acid sequence with no more than 1, 2, 3, or 4 mutations, e.g., substitutions, additions, or deletions.

[0603] 5. The antibody molecule of any of embodiments 1-4, wherein the VLCDR1 comprises the amino acid sequence of any of SEQ ID NOs: 26, 40, 54, 68, 82, 96, 110, or 123, or an amino acid sequence with no more than 1, 2, 3, or 4 mutations, e.g., substitutions, additions, or deletions.

[0604] 6. The antibody molecule of any of embodiments 1-5, wherein the VLCDR2 comprises the amino acid sequence of any of SEQ ID NOs: 28, 7393, 56, 70, 84, 98, 112, or 125, or an amino acid sequence with no more than 1, 2, 3, or 4 mutations, e.g., substitutions, additions, or deletions.

[0605] 7. The antibody molecule of any of embodiments 1-6, wherein the VLCDR3 comprises the amino acid sequence of any of SEQ ID NOs: 30, 7395, 58, 72, 86, 100, 113, or 127, or an amino acid sequence with no more than 1, 2, 3, or 4 mutations, e.g., substitutions, additions, or deletions.

[0606] 8. The antibody molecule of any of embodiments 1-7, comprising:
[0607] (a) a heavy chain framework region 1 (VHFWR1), a heavy chain framework region 2 (VHFWR1), a heavy chain framework region 3 (VHFWR3), and/or a heavy chain framework region 4 (VHFWR4) described in Table 8A, or an amino acid sequence with no more than 1, 2, 3, or 4 mutations, e.g., substitutions, additions, or deletions; and/or
[0608] (b) a light chain framework region 1 (VLFWR1), a light chain framework region 2 (VLFWR1), a light chain framework region 3 (VLFWR3), and/or a light chain framework region 4 (VLFWR4) described in Table 8B, or an amino acid sequence with no more than 1, 2, 3, or 4 mutations, e.g., substitutions, additions, or deletions.

[0609] 9. The antibody molecule of any of embodiments 1-8, comprising:
[0610] (a) a heavy chain variable region (VH) described in Table 9, e.g., a VH comprising the amino acid sequence of any of SEQ ID NOs: 1-8, or an amino acid sequence having at least about 75%, 80%, 85%, 90%, 95%, or 99% sequence identity thereto; and/or
[0611] (b) a light chain variable region (VL) described in Table 9, e.g., a VL comprising the amino acid sequence of any of SEQ ID NOs: 9-16, or an amino acid sequence having at least about 75%, 80%, 85%, 90%, 95%, or 99% sequence identity thereto.

[0612] 10. The antibody molecule of any of embodiments 1-9, comprising an amino acid sequence described in Table 10, e.g., the amino acid sequence of any of SEQ ID NOs: 17, and 7386-7392, or an amino acid sequence having at least about 75%, 80%, 85%, 90%, 95%, or 99% sequence identity thereto.

[0613] 11. A multispecific molecule comprising the antibody molecule of any of embodiments 1-10.

[0614] 12. The multispecific molecule of embodiment 11, further comprising one, two, three, four or more of:
[0615] a. a tumor targeting moiety, e.g., as described herein;
[0616] b. a cytokine molecule, e.g., as described herein;
[0617] c. a T cell engager, e.g., as described herein; or
[0618] d. a stromal modifying moiety, e.g., as described herein.

[0619] 13. The multispecific molecule of embodiment 11, further comprising a binding specificity that binds to an autoreactive T cell, e.g., an antigen present on the surface of an autoreactive T cell that is associated with the inflammatory or autoimmune disorder.

[0620] 14. The multispecific molecule of embodiment 11, further comprising a binding specificity that binds to an infected cell, e.g., a viral or bacterial infected cell.

[0621] 15. The antibody molecule of any of embodiments 1-10, or the multispecific molecule of any of embodiments 11-14, which is a monospecific antibody molecule, a bispecific antibody molecule, or a trispecific antibody molecule.

[0622] 16. The antibody molecule of any of embodiments 1-10, or the multispecific molecule of any of embodiments 11-14, which is a monovalent antibody molecule, a bivalent antibody molecule, or a trivalent antibody molecule.

[0623] 17. The antibody molecule of any of embodiments 1-10, 15, or 16, or the multispecific molecule of any of embodiments 11-15, which is a full antibody (e.g., an antibody that includes at least one, and preferably two, complete heavy chains, and at least one, and preferably two, complete light chains), or an antigen-binding fragment (e.g., a Fab, F(ab′)₂, Fv, a single chain Fv, a single domain antibody, a diabody (dAb), a bivalent antibody, or bispecific antibody or fragment thereof, a single domain variant thereof, or a camelid antibody).

[0624] 18. The antibody molecule or the multispecific molecule of any of embodiments 1-17, which comprises a heavy chain constant region chosen from IgG1, IgG2, IgG3, or IgG4, or a fragment thereof.

[0625] 19. The antibody molecule or the multispecific molecule of any of embodiments 1-18, which comprises a light chain constant region chosen from the light chain constant regions of kappa or lambda, or a fragment thereof.

[0626] 20. The antibody molecule or the multispecific molecule of any of embodiments 1-19, wherein the immunoglobulin chain constant region (e.g., Fc region) is altered, e.g., mutated, to increase or decrease one or more of: Fc receptor binding, antibody glycosylation, the number of cysteine residues, effector cell function, or complement function.

[0627] 21. The antibody molecule or the multispecific molecule of any of embodiments 1-20, wherein an interface of a first and second immunoglobulin chain constant regions (e.g., Fc region) is altered, e.g., mutated, to increase or decrease dimerization, e.g., relative to a non-engineered interface.

[0628] 22. The antibody molecule or the multispecific molecule of embodiment 21, wherein the dimerization of the immunoglobulin chain constant region (e.g., Fc region) is enhanced by providing an Fc interface of a first and a second Fc region with one or more of: a paired cavity-protuberance (“knob-in-a hole”), an electrostatic interaction, or a strand-exchange, such that a greater ratio of heteromultimer:homomultimer forms, e.g., relative to a non-engineered interface.

[0629] 23. The antibody molecule or the multispecific molecule of embodiment 21 or 22, wherein the immunoglobulin chain constant region (e.g., Fc region) comprises an amino acid substitution at a position chosen from one or more of 347, 349, 350, 351, 366, 368, 370, 392, 394, 395, 397, 398, 399, 405, 407, or 409, e.g., of the Fc region of human IgG1.

[0630] 24. The antibody molecule or the multispecific molecule of embodiment 21, wherein the immunoglobulin chain constant region (e.g., Fc region) comprises an amino acid substitution chosen from: T366S, L368A, or Y407V (e.g., corresponding to a cavity or hole), or T366W (e.g., corresponding to a protuberance or knob), or a combination thereof.

[0631] 25. The antibody molecule or the multispecific molecule of any of embodiments 1-24, further comprising a linker, e.g., a linker between one or more of: the targeting moiety and the cytokine molecule or the stromal modifying moiety, the targeting moiety and the immune cell engager, the cytokine molecule or the stromal modifying moiety, and the immune cell engager, the cytokine molecule or the stromal modifying moiety and the immunoglobulin chain constant region (e.g., the Fc region), the targeting moiety and the immunoglobulin chain constant region, or the immune cell engager and the immunoglobulin chain constant region.

[0632] 26. The antibody molecule or the multispecific molecule of embodiment 25, wherein the linker is selected from: a cleavable linker, a non-cleavable linker, a peptide linker, a flexible linker, a rigid linker, a helical linker, or a non-helical linker.

[0633] 27. The antibody molecule or the multispecific molecule of embodiment 26, wherein the linker is a peptide linker.

[0634] 28. The antibody molecule or the multispecific molecule of embodiment 27, wherein the peptide linker comprises Gly and Ser.

[0635] 29. An isolated nucleic acid molecule, which comprises the nucleotide sequence encoding any of the antibody molecules or multispecific or multifunctional molecules described herein, or a nucleotide sequence substantially homologous thereto (e.g., at least 95% to 99.9% identical thereto).

[0636] 30. An isolated nucleic acid encoding the antibody molecule or the multispecific molecule of any of embodiments 1-29.

[0637] 31. A vector, e.g., an expression vector, comprising one or more of the nucleic acid molecules of embodiment 29 or 30.

[0638] 32. A host cell comprising the nucleic acid molecule or the vector of any one of embodiments 29-31.

[0639] 33. A method of making, e.g., producing, the antibody molecule or the multispecific or multifunctional molecule polypeptide of any of embodiments 1-28, comprising culturing the host cell of embodiment 32, under suitable conditions, e.g., conditions suitable for gene expression and/or homo- or heterodimerization.

[0640] 34. A pharmaceutical composition comprising the antibody molecule or the multispecific or multifunctional molecule polypeptide of any of embodiments 1-28 and a pharmaceutically acceptable carrier, excipient, or stabilizer.

[0641] 35. A method of treating a cancer, comprising administering to a subject in need thereof the antibody molecule or the multispecific or multifunctional molecule polypeptide of any of embodiments 1-12 or 15-28, wherein the multispecific antibody is administered in an amount effective to treat the cancer.

[0642] 36. The antibody molecule or the multispecific or multifunctional molecule polypeptide of any of embodiments 1-12 or 15-28 for use in treating cancer.

[0643] 37. The method of embodiment 35 or the use of embodiment 36, wherein the cancer is a solid tumor cancer, or a metastatic lesion.

[0644] 38. The method of embodiment 37 or the use of embodiment 37, wherein the solid tumor cancer is one or more of pancreatic (e.g., pancreatic adenocarcinoma), breast, colorectal, lung (e.g., small or non-small cell lung cancer), skin, ovarian, or liver cancer.

[0645] 39. The method of embodiment 35 or the use of embodiment 36, wherein the cancer is a hematological cancer.

[0646] 40. The method of any of embodiments 35 or 37-39 or the use of any of embodiments 36-39, further comprising administering a second therapeutic treatment.

[0647] 41. The method of embodiment 40 or the use of embodiment 40, wherein the second therapeutic treatment comprises a therapeutic agent (e.g., a chemotherapeutic agent, a biologic agent, hormonal therapy), radiation, or surgery.

[0648] 42. The method of embodiment 41 or the use of embodiment 41, wherein the therapeutic agent is selected from: a chemotherapeutic agent, or a biologic agent.

[0649] 43. A method of treating an autoimmune or an inflammatory disorder, comprising administering to a subject in need thereof the antibody molecule or the multispecific or multifunctional molecule polypeptide of any of embodiments 1-11, 13, or 15-28, wherein the multispecific antibody is administered in an amount effective to treat the autoimmune or the inflammatory disorder.

[0650] 44. The antibody molecule or the multispecific or multifunctional molecule polypeptide of any of embodiments 1-11, 13, or 15-28 for use in treating an autoimmune or an autoinflammatory disorder.

[0651] 45. A method of treating an infectious disorder, comprising administering to a subject in need thereof the antibody molecule or the multispecific or multifunctional molecule polypeptide of any of embodiments 1-11 or 14-28, wherein the multispecific antibody is administered in an amount effective to treat the infectious disorder.

[0652] 46. The antibody molecule or the multispecific or multifunctional molecule polypeptide of any of embodiments 1-11 or 14-28 for use in treating an infectious disorder.

The application's sequence listing, which the Patent Office published only in electronic form, follows.

SEQUENCE LISTING (7400 sequences)

SEQ ID NO: 1 - protein, 118 aa, synthetic construct
EIQLLESGGGLVQPGGSLRLSCAVSGFSITTTGYHWNWVRQAPGKGLEWVGYIYSSGSTSYNPSLKSRFTISRDTSKNTFYLQMNSLRAEDTAVYYCARGDWHYFDYWGQGTMVTVSS

SEQ ID NO: 2 - protein, 118 aa, synthetic construct; identical to SEQ ID NO: 1

SEQ ID NO: 3 - protein, 118 aa, synthetic construct; identical to SEQ ID NO: 1

SEQ ID NO: 4 - protein, 118 aa, synthetic construct; identical to SEQ ID NO: 1

SEQ ID NO: 5 - protein, 118 aa, synthetic construct
EIQLLESGGGLVQPGGSLRLSCAVSGFSITTTGYHWNWVRQAPGKGLEWVGYIYSSGSTSYAPSLKSRFTISRDTSKNTFYLQMNSLRAEDTAVYYCARGDWHYFDYWGQGTMVTVSS

SEQ ID NO: 6 - protein, 118 aa, synthetic construct; identical to SEQ ID NO: 5

SEQ ID NO: 7 - protein, 118 aa, synthetic construct; identical to SEQ ID NO: 5

SEQ ID NO: 8 - protein, 118 aa, synthetic construct; identical to SEQ ID NO: 5

SEQ ID NO: 9 - protein, 108 aa, synthetic construct
DSVTTQSPLSLPVTLGQPASISCSGEKLSDKYVHWYQQRPGQSPRMLIYENDRRPSGVPDRFSGSNSGNDATLKISRVEAEDVGVYFCQFWDSTASAVFGGGTKVEIK

SEQ ID NO: 10 - protein, 108 aa, synthetic construct
DSVTTQSPLSLPVTLGQPASISCSGEKLSDKYVHWYQQRPGQSPRMLIYENDRRPSGVPDRFSGSNSGNDATLKISRVEAEDVGVYFCQFWASTNSAVFGGGTKVEIK

SEQ ID NO: 11 - protein, 107 aa, synthetic construct
SSETTQPPSVSVSPGQTASITCSGEKLSDKYVHWYQQKPGQSPVMVIYENDRRPSGIPERFSGSNSGNTATLTISGTQAMDEADYFCQFWASTNSAVFGGGTQLTVL

SEQ ID NO: 12 - protein, 107 aa, synthetic construct
SSETTQPPSVSVSPGQTASITCSGEKLSDKYVHWYQQKPGQSPVMVIYENDRRPSGIPERFSGSNSGNTATLTISGTQAMDEADYFCQFWDSTASAVFGGGTQLTVL

SEQ ID NO: 13 - protein, 108 aa, synthetic construct
DSVTTQSPLSLPVTLGQPASISCSGEKLSDKYVHWYQQRPGQSPRMLIYENDRRPSGVPDRFSGSNSGNDATLKISRVEAEDVGVYFCQFWDSTNSAVFGGGTKVEIK

SEQ ID NO: 14 - protein, 107 aa, synthetic construct
SSETTQPPSVSVSPGQTASITCSGEKLSDKYVHWYQQKPGQSPVMVIYENDRRPSGIPERFSGSNSGNTATLTISGTQAMDEADYFCQFWDSTNSAVFGGGTQLTVL

SEQ ID NO: 15 - protein, 108 aa, synthetic construct
DSVTTQSPLSLPVTLGQPASISCSGEKLSDKYVHWYQQRPGQSPRMLIYENDRRPSGVPDRFSGSNSGNDATLKISRVEAEDVGVYFCQFWASTASAVFGGGTKVEIK

SEQ ID NO: 16 - protein, 107 aa, synthetic construct
SSETTQPPSVSVSPGQTASITCSGEKLSDKYVHWYQQKPGQSPVMVIYENDRRPSGIPERFSGSNSGNTATLTISGTQAMDEADYFCQFWASTASAVFGGGTQLTVL

SEQ ID NO: 17 - protein, 246 aa, synthetic construct
EIQLLESGGGLVQPGGSLRLSCAVSGFSITTTGYHWNWVRQAPGKGLEWVGYIYSSGSTSYNPSLKSRFTISRDTSKNTFYLQMNSLRAEDTAVYYCARGDWHYFDYWGQGTMVTVSSGGGGSGGGGSGGGGSGGGGSDSVTTQSPLSLPVTLGQPASISCSGEKLSDKYVHWYQQRPGQSPRMLIYENDRRPSGVPDRFSGSNSGNDATLKISRVEAEDVGVYFCQFWDSTASAVFGGGTKVEIK

SEQ ID NO: 18 - protein, 28 aa, synthetic construct
EIQLLESGGGLVQPGGSLRLSCAVSGFS

SEQ ID NO: 19 - protein, 9 aa, synthetic construct
ITTTGYHWN

SEQ ID NO: 20 - protein, 14 aa, synthetic construct
WVRQAPGKGLEWVG

SEQ ID NO: 21 - protein, 16 aa, synthetic construct
YIYSSGSTSYNPSLKS

SEQ ID NO: 22 - protein, 32 aa, synthetic construct
RFTISRDTSKNTFYLQMNSLRAEDTAVYYCAR

SEQ ID NO: 23 - protein, 8 aa, synthetic construct
GDWHYFDY

SEQ ID NO: 24 - protein, 11 aa, synthetic construct
WGQGTMVTVSS

SEQ ID NO: 25 - protein, 23 aa, synthetic construct
DSVTTQSPLSLPVTLGQPASISC

SEQ ID NO: 26 - protein, 11 aa, synthetic construct
SGEKLSDKYVH

SEQ ID NO: 27 - protein, 15 aa, synthetic construct
WYQQRPGQSPRMLIY

SEQ ID NO: 28 - protein, 7 aa, synthetic construct
ENDRRPS

SEQ ID NO: 29 - protein, 32 aa, synthetic construct
GVPDRFSGSNSGNDATLKISRVEAEDVGVYFC

SEQ ID NO: 30 - protein, 10 aa, synthetic construct
QFWDSTASAV

SEQ ID NO: 31 - protein, 10 aa, synthetic construct
FGGGTKVEIK

SEQ ID NO: 32 - protein, 28 aa, synthetic construct
EIQLLESGGGLVQPGGSLRLSCAVSGFS

SEQ ID NO: 33 - protein, 9 aa, synthetic construct
ITTTGYHWN

SEQ ID NO: 34 - protein, 14 aa, synthetic construct
WVRQAPGKGLEWVG

SEQ ID NO: 35 - protein, 16 aa, synthetic construct
YIYSSGSTSYNPSLKS

SEQ ID NO: 36 - protein, 32 aa, synthetic construct; identical to SEQ ID NO: 22

SEQ ID NO: 37 - protein, 8 aa, synthetic construct
GDWHYFDY

SEQ ID NO: 38 - protein, 11 aa, synthetic construct
WGQGTMVTVSS

SEQ ID NO: 39 - protein, 23 aa, synthetic construct
DSVTTQSPLSLPVTLGQPASISC

SEQ ID NO: 40 - protein, 11 aa, synthetic construct
SGEKLSDKYVH

SEQ ID NO: 41 - protein, 15 aa, synthetic construct
WYQQRPGQSPRMLIY

SEQ ID NO: 42 - protein, 5 aa, synthetic construct
GGGGS

SEQ ID NO: 43 - protein, 10 aa, synthetic construct
GGGGSGGGGS

SEQ ID NO: 44 - protein, 15 aa, synthetic construct
GGGGSGGGGSGGGGS

SEQ ID NO: 45 - protein, 17 aa, synthetic construct
DVPSGPGGGGGSGGGGS

SEQ ID NO: 46 - protein, 28 aa, synthetic construct
EIQLLESGGGLVQPGGSLRLSCAVSGFS

SEQ ID NO: 47 - protein, 9 aa, synthetic construct
ITTTGYHWN

SEQ ID NO: 48 - protein, 14 aa, synthetic construct
WVRQAPGKGLEWVG

SEQ ID NO: 49 - protein, 16 aa, synthetic construct
YIYSSGSTSYNPSLKS

SEQ ID NO: 50 - protein, 32 aa, synthetic construct; identical to SEQ ID NO: 22

SEQ ID NO: 51 - protein, 8 aa, synthetic construct
GDWHYFDY

SEQ ID NO: 52 - protein, 11 aa, synthetic construct
WGQGTMVTVSS

SEQ ID NO: 53 - protein, 22 aa, synthetic construct
SSETTQPPSVSVSPGQTASITC

SEQ ID NO: 54 - protein, 11 aa, synthetic construct
SGEKLSDKYVH

SEQ ID NO: 55 - protein, 15 aa, synthetic construct
WYQQKPGQSPVMVIY

SEQ ID NO: 56 - protein, 7 aa, synthetic construct
ENDRRPS

SEQ ID NO: 57 - protein, 32 aa, synthetic construct
GIPERFSGSNSGNTATLTISGTQAMDEADYFC

SEQ ID NO: 58 - protein, 10 aa, synthetic construct
QFWASTNSAV

SEQ ID NO: 59 - protein, 10 aa, synthetic construct
FGGGTQLTVL

SEQ ID NO: 60 - protein, 28 aa, synthetic construct
EIQLLESGGGLVQPGGSLRLSCAVSGFS

SEQ ID NO: 61 - protein, 9 aa, synthetic construct
ITTTGYHWN

SEQ ID NO: 62 - protein, 14 aa, synthetic construct
WVRQAPGKGLEWVG

SEQ ID NO: 63 - protein, 16 aa, synthetic construct
YIYSSGSTSYNPSLKS

SEQ ID NO: 64 - protein, 32 aa, synthetic construct; identical to SEQ ID NO: 22

SEQ ID NO: 65 - protein, 8 aa, synthetic construct
GDWHYFDY

SEQ ID NO: 66 - protein, 11 aa, synthetic construct
WGQGTMVTVSS

SEQ ID NO: 67 - protein, 22 aa, synthetic construct
SSETTQPPSVSVSPGQTASITC

SEQ ID NO: 68 - protein, 11 aa, synthetic construct
SGEKLSDKYVH

SEQ ID NO: 69 - protein, 15 aa, synthetic construct
WYQQKPGQSPVMVIY

SEQ ID NO: 70 - protein, 7 aa, synthetic construct
ENDRRPS

SEQ ID NO: 71 - protein, 32 aa, synthetic construct; identical to SEQ ID NO: 57

SEQ ID NO: 72 - protein, 10 aa, synthetic construct
QFWDSTASAV

SEQ ID NO: 73 - protein, 10 aa, synthetic construct
FGGGTQLTVL

SEQ ID NO: 74 - protein, 28 aa, synthetic construct
EIQLLESGGGLVQPGGSLRLSCAVSGFS

SEQ ID NO: 75 - protein, 14 aa, synthetic construct
AEAAAKEAAAKAAA

SEQ ID NO: 76 - protein, 19 aa, synthetic construct
AEAAAKEAAAKEAAAKAAA

SEQ ID NO: 77 - protein, 24 aa, synthetic construct
AEAAAKEAAAKEAAAKEAAAKAAA

SEQ ID NO: 78 - protein, 29 aa, synthetic construct
AEAAAKEAAAKEAAAKEAAAKEAAAKAAA

SEQ ID NO: 79 - protein, 8 aa, synthetic construct
GDWHYFDY

SEQ ID NO: 80 - protein, 11 aa, synthetic construct
WGQGTMVTVSS

SEQ ID NO: 81 - protein, 23 aa, synthetic construct
DSVTTQSPLSLPVTLGQPASISC

SEQ ID NO: 82 - protein, 11 aa, synthetic construct
SGEKLSDKYVH

SEQ ID NO: 83 - protein, 15 aa, synthetic construct
WYQQRPGQSPRMLIY

SEQ ID NO: 84 - protein, 7 aa, synthetic construct
ENDRRPS

SEQ ID NO: 85 - protein, 32 aa, synthetic construct; identical to SEQ ID NO: 29

SEQ ID NO: 86 - protein, 10 aa, synthetic construct
QFWDSTNSAV

SEQ ID NO: 87 - protein, 10 aa, synthetic construct
FGGGTKVEIK

SEQ ID NO: 88 - protein, 28 aa, synthetic construct
EIQLLESGGGLVQPGGSLRLSCAVSGFS

SEQ ID NO: 89 - protein, 9 aa, synthetic construct
ITTTGYHWN

SEQ ID NO: 90 - protein, 14 aa, synthetic construct
WVRQAPGKGLEWVG

SEQ ID NO: 91 - protein, 16 aa, synthetic construct
YIYSSGSTSYAPSLKS

SEQ ID NO: 92 - protein, 32 aa, synthetic construct; identical to SEQ ID NO: 22

SEQ ID NO: 93 - protein, 8 aa, synthetic construct
GDWHYFDY

SEQ ID NO: 94 - protein, 11 aa, synthetic construct
WGQGTMVTVSS

SEQ ID NO: 95 - protein, 22 aa, synthetic construct
SSETTQPPSVSVSPGQTASITC

SEQ ID NO: 96 - protein, 11 aa, synthetic construct
SGEKLSDKYVH

SEQ ID NO: 97 - protein, 15 aa, synthetic construct
WYQQKPGQSPVMVIY

SEQ ID NO: 98 - protein, 7 aa, synthetic construct
ENDRRPS

SEQ ID NO: 99 - protein, 32 aa, synthetic construct; identical to SEQ ID NO: 57

SEQ ID NO: 100 - protein, 10 aa, synthetic construct
QFWDSTNSAV

SEQ ID NO: 101 - protein, 10 aa, synthetic construct
FGGGTQLTVL

SEQ ID NO: 102 - protein, 28 aa, synthetic construct
EIQLLESGGGLVQPGGSLRLSCAVSGFS

SEQ ID NO: 103 - protein, 9 aa, synthetic construct
ITTTGYHWN

SEQ ID NO: 104 - protein, 14 aa, synthetic construct
WVRQAPGKGLEWVG

SEQ ID NO: 105 - protein, 16 aa, synthetic construct
YIYSSGSTSYAPSLKS

SEQ ID NO: 106 - protein, 32 aa, synthetic construct; identical to SEQ ID NO: 22

SEQ ID NO: 107 - protein, 8 aa, synthetic construct
GDWHYFDY

SEQ ID NO: 108 - protein, 11 aa, synthetic construct
WGQGTMVTVSS

SEQ ID NO: 109 - protein, 23 aa, synthetic construct
DSVTTQSPLSLPVTLGQPASISC

SEQ ID NO: 110 - protein, 11 aa, synthetic construct
SGEKLSDKYVH

SEQ ID NO: 111 - protein, 15 aa, synthetic construct
WYQQRPGQSPRMLIY

SEQ ID NO: 112 - protein, 7 aa, synthetic construct
ENDRRPS

SEQ ID NO: 113 - protein, 10 aa, synthetic construct
QFWASTASAV

SEQ ID NO: 114 - protein, 10 aa, synthetic construct
FGGGTKVEIK

SEQ ID NO: 115 - protein, 28 aa, synthetic construct
EIQLLESGGGLVQPGGSLRLSCAVSGFS

SEQ ID NO: 116 - protein, 9 aa, synthetic construct
ITTTGYHWN

SEQ ID NO: 117 - protein, 14 aa, synthetic construct
WVRQAPGKGLEWVG

SEQ ID NO: 118 - protein, 16 aa, synthetic construct
YIYSSGSTSYAPSLKS

SEQ ID NO: 119 - protein, 32 aa, synthetic construct; identical to SEQ ID NO: 22

SEQ ID NO: 120 - protein, 8 aa, synthetic construct
GDWHYFDY

SEQ ID NO: 121 - protein, 11 aa, synthetic construct
WGQGTMVTVSS

SEQ ID NO: 122 - protein, 22 aa, synthetic construct
SSETTQPPSVSVSPGQTASITC

SEQ ID NO: 123 - protein, 11 aa, synthetic construct
SGEKLSDKYVH

SEQ ID NO: 124 - protein, 15 aa, synthetic construct
WYQQKPGQSPVMVIY

SEQ ID NO: 125 - protein, 7 aa, synthetic construct
ENDRRPS

SEQ ID NO: 126 - protein, 32 aa, synthetic construct; identical to SEQ ID NO: 57

SEQ ID NO: 127 - protein, 10 aa, synthetic construct
QFWASTASAV

SEQ ID NO: 128 - protein, 10 aa, synthetic construct
FGGGTQLTVL

SEQ ID NO: 129-232 - skipped (104 entries)

SEQ ID NO: 233 - protein, 10 aa, synthetic construct
FGGGTKVEIK

SEQ ID NO: 234-3091 - skipped (2858 entries)

SEQ ID NO: 3092 - protein, 390 aa, Homo sapiens
MPPSGLRLLLLLLPLLWLLVLTPGRPAAGLSTCKTIDMELVKRKRIEAIRGQILSKLRLASPPSQGEVPPGPLPEAVLALYNSTRDRVAGESAEPEPEPEADYYAKEVTRVLMVETHNEIYDKFKQSTHSIYMFFNTSELREAVPEPVLLSRAELRLLRLKLKVEQHVELYQKYSNNSWRYLSNRLLAPSDSPEWLSFDVTGVVRQWLSRGGEIEGFRLSAHCSCDSRDNTLQVDINGFTTGRRGDLATIHGMNRPFLLLMATPLERAQHLQSSRHRRALDTNYCFSSTEKNCCVRQLYIDFRKDLGWKWIHEPKGYHANFCLGPCPYIWSLDTQYSKVLALYNQHNPGASAAPCCVPQALEPLPIVYYVGRKPKVEQLSNMIVRSCKCS

SEQ ID NO: 3093 - protein, 414 aa, Homo sapiens
MHYCVLSAFLILHLVTVALSLSTCSTLDMDQFMRKRIEAIRGQILSKLKLTSPPEDYPEPEEVPPEVISIYNSTRDLLQEKASRRAAACERERSDEEYYAKEVYKIDMPPFFPSENAIPPTFYRPYFRIVRFDVSAMEKNASNLVKAEFRVFRLQNPKARVPEQRIELYQILKSKDLTSPTQRYIDSKVVKTRAEGEWLSFDVTDAVHEWLHHKDRNLGFKISLHCPCCTFVPSNNYIIPNKSEELEARFAGIDGTSTYTSGDQKTIKSTRKKNSGKTPHLLLMLLPSYRLESQQTNRRKKRALDAAYCFRNVQDNCCLRPLYIDFKRDLGWKWIHEPKGYNANFCAGACPYLWSSDTQHSRVLSLYNTINPEASASPCCVSQDLEPLTILYYIGKTPKIEQLSNMIVKSCKCS

SEQ ID NO: 3094 - protein, 412 aa, Homo sapiens
MKMHLQRALVVLALLNFATVSLSLSTCTTLDFGHIKKKRVEAIRGQILSKLRLTSPPEPTVMTHVPYQVLALYNSTRELLEEMHGEREEGCTQENTESEYYAKEIHKFDMIQGLAEHNELAVCPKGITSKVFRFNVSSVEKNRTNLFRAEFRVLRVPNPSSKRNEQRIELFQILRPDEHIAKQRYIGGKNLPTRGTAEWLSFDVTDTVREWLLRRESNLGLEISIHCPCHTFQPNGDILENIHEVMEIKFKGVDNEDDHGRGDLGRLKKQKDHHNPHLILMMIPPHRLDNPGQGGQRKKRALDTNYCFRNLEENCCVRPLYIDFRQDLGWKWVHEPKGYYANFCSGPCPYLRSADTTHSTVLGLYNTLNPEASASPCCVPQDLEPLTILYYVGRTPKVEQLSNMVVKSCKCS

SEQ ID NO: 3095 - protein, 503 aa, Homo sapiens
MEAAVAAPRPRLLLLVLAAAAAAAAALLPGATALQCFCHLCTKDNFTCVTDGLCFVSVTETTDKVIHNSMCIAEIDLIPRDRPFVCAPSSKTGSVTTTYCCNQDHCNKIELPTTVKSSPGLGPVELAAVIAGPVCFVCISLMLMVYICHNRTVIHHRVPNEEDPSLDRPFISEGTTLKDLIYDMTTSGSGSGLPLLVQRTIARTIVLQESIGKGRFGEVWRGKWRGEEVAVKIFSSREERSWFREAEIYQTVMLRHENILGFIAADNKDNGTWTQLWLVSDYHEHGSLFDYLNRYTVTVEGMIKLALSTASGLAHLHMEIVGTQGKPAIAHRDLKSKNILVKKNGTCCIADLGLAVRHDSATDTIDIAPNHRVGTKRYMAPEVLDDSINMKHFESFKRADIYAMGLVFWEIARRCSIGGIHEDYQLPYYDLVPSDPSVEEMRKVVCEQKLRPNIPNRWQSCEALRVMAKIMRECWYANGAARLTALRIKKTLSQLSQQEGIKM

SEQ ID NO: 3096 - protein, 507 aa, Homo sapiens
MEAAVAAPRPRLLLLVLAAAAAAAAALLPGATALQCFCHLCTKDNFTCVTDGLCFVSVTETTDKVIHNSMCIAEIDLIPRDRPFVCAPSSKTGSVTTTYCCNQDHCNKIELPTTGPFSVKSSPGLGPVELAAVIAGPVCFVCISLMLMVYICHNRTVIHHRVPNEEDPSLDRPFISEGTTLKDLIYDMTTSGSGSGLPLLVQRTIARTIVLQESIGKGRFGEVWRGKWRGEEVAVKIFSSREERSWFREAEIYQTVMLRHENILGFIAADNKDNGTWTQLWLVSDYHEHGSLFDYLNRYTVTVEGMIKLALSTASGLAHLHMEIVGTQGKPAIAHRDLKSKNILVKKNGTCCIADLGLAVRHDSATDTIDIAPNHRVGTKRYMAPEVLDDSINMKHFESFKRADIYAMGLVFWEIARRCSIGGIHEDYQLPYYDLVPSDPSVEEMRKVVCEQKLRPNIPNRWQSCEALRVMAKIMRECWYANGAARLTALRIKKTLSQLSQQEGIKM

SEQ ID NO: 3097 - protein, 426 aa, Homo sapiens
MEAAVAAPRPRLLLLVLAAAAAAAAALLPGATALQCFCHLCTKDNFTCVTDGLCFVSVTETTDKVIHNSMCIAEIDLIPRDRPFVCAPSSKTGSVTTTYCCNQDHCNKIELPTTGLPLLVQRTIARTIVLQESIGKGRFGEVWRGKWRGEEVAVKIFSSREERSWFREAEIYQTVMLRHENILGFIAADNKDNGTWTQLWLVSDYHEHGSLFDYLNRYTVTVEGMIKLALSTASGLAHLHMEIVGTQGKPAIAHRDLKSKNILVKKNGTCCIADLGLAVRHDSATDTIDIAPNHRVGTKRYMAPEVLDDSINMKHFESFKRADIYAMGLVFWEIARRCSIGGIHEDYQLPYYDLVPSDPSVEEMRKVVCEQKLRPNIPNRWQSCEALRVMAKIMRECWYANGAARLTALRIKKTLSQLSQQEGIKM

SEQ ID NO: 3098 - protein, 567 aa, Homo sapiens
MGRGLLRGLWPLHIVLWTRIASTIPPHVQKSVNNDMIVTDNNGAVKFPQLCKFCDVRFSTCDNQKSCMSNCSITSICEKPQEVCVAVWRKNDENITLETVCHDPKLPYHDFILEDAASPKCIMKEKKKPGETFFMCSCSSDECNDNIIFSEEYNTSNPDLLLVIFQVTGISLLPPLGVAISVIIIFYCYRVNRQQKLSSTWETGKTRKLMEFSEHCAIILEDDRSDISSTCANNINHNTELLPIELDTLVGKGRFAEVYKAKLKQNTSEQFETVAVKIFPYEEYASWKTEKDIFSDINLKHENILQFLTAEERKTELGKQYWLITAFHAKGNLQEYLTRHVISWEDLRKLGSSLARGIAHLHSDHTPCGRPKMPIVHRDLKSSNILVKNDLTCCLCDFGLSLRLDPTLSVDDLANSGQVGTARYMAPEVLESRMNLENVESFKQTDVYSMALVLWEMTSRCNAVGEVKDYEPPFGSKVREHPCVESMKDNVLRDRGRPEIPSFWLNHQGIQMVCETLTECWDHDPEARLTAQCVAERFSELEHLDRLSGRSCSEEKIPEDGSLNTTK

SEQ ID NO: 3099 - protein, 592 aa, Homo sapiens
MGRGLLRGLWPLHIVLWTRIASTIPPHVQKSDVEMEAQKDEIICPSCNRTAHPLRHINNDMIVTDNNGAVKFPQLCKFCDVRFSTCDNQKSCMSNCSITSICEKPQEVCVAVWRKNDENITLETVCHDPKLPYHDFILEDAASPKCIMKEKKKPGETFFMCSCSSDECNDNIIFSEEYNTSNPDLLLVIFQVTGISLLPPLGVAISVIIIFYCYRVNRQQKLSSTWETGKTRKLMEFSEHCAIILEDDRSDISSTCANNINHNTELLPIELDTLVGKGRFAEVYKAKLKQNTSEQFETVAVKIFPYEEYASWKTEKDIFSDINLKHENILQFLTAEERKTELGKQYWLITAFHAKGNLQEYLTRHVISWEDLRKLGSSLARGIAHLHSDHTPCGRPKMPIVHRDLKSSNILVKNDLTCCLCDFGLSLRLDPTLSVDDLANSGQVGTARYMAPEVLESRMNLENVESFKQTDVYSMALVLWEMTSRCNAVGEVKDYEPPFGSKVREHPCVESMKDNVLRDRGRPEIPSFWLNHQGIQMVCETLTECWDHDPEARLTAQCVAERFSELEHLDRLSGRSCSEEKIPEDGSLNTTK

SEQ ID NO: 3100 - protein, 137 aa, Homo sapiens
TIPPHVQKSVNNDMIVTDNNGAVKFPQLCKFCDVRFSTCDNQKSCMSNCSITSICEKPQEVCVAVWRKNDENITLETVCHDPKLPYHDFILEDAASPKCIMKEKKKPGETFFMCSCSSDECNDNIIFSEEYNTSNPD

SEQ ID NO: 3101 - protein, 136 aa, Homo sapiens
IPPHVQKSVNNDMIVTDNNGAVKFPQLCKFCDVRFSTCDNQKSCMSNCSITSICEKPQEVCVAVWRKNDENITLETVCHDPKLPYHDFILEDAASPKCIMKEKKKPGETFFMCSCSSDECNDNIIFSEEYNTSNPD

SEQ ID NO: 3102 - protein, 162 aa, Homo sapiens
TIPPHVQKSDVEMEAQKDEIICPSCNRTAHPLRHINNDMIVTDNNGAVKFPQLCKFCDVRFSTCDNQKSCMSNCSITSICEKPQEVCVAVWRKNDENITLETVCHDPKLPYHDFILEDAASPKCIMKEKKKPGETFFMCSCSSDECNDNIIFSEEYNTSNPD

SEQ ID NO: 3103 - protein, 101 aa, Homo sapiens
QLCKFCDVRFSTCDNQKSCMSNCSITSICEKPQEVCVAVWRKNDENITLETVCHDPKLPYHDFILEDAASPKCIMKEKKKPGETFFMCSCSSDECNDNIIF

SEQ ID NO: 3104 - protein, 93 aa, Homo sapiens
LQCFCHLCTKDNFTCVTDGLCFVSVTETTDKVIHNSMCIAEIDLIPRDRPFVCAPSSKTGSVTTTYCCNQDHCNKIELPTTVKSSPGLGPVEL

SEQ ID NO: 3105 - protein, 79 aa, Homo sapiens
ALQCFCHLCTKDNFTCVTDGLCFVSVTETTDKVIHNSMCIAEIDLIPRDRPFVCAPSSKTGSVTTTYCCNQDHCNKIEL

SEQ ID NO: 3106 - protein, 851 aa, Homo sapiens
MTSHYVIAIFALMSSCLATAGPEPGALCELSPVSASHPVQALMESFTVLSGCASRGTTGLPQEVHVLNLRTAGQGPGQLQREVTLHLNPISSVHIHHKSVVFLLNSPHPLVWHLKTERLATGVSRLFLVSEGSVVQFSSANFSLTAETEERNFPHGNEHLLNWARKEYGAVTSFTELKIARNIYIKVGEDQVFPPKCNIGKNFLSLNYLAEYLQPKAAEGCVMSSQPQNEEVHIIELITPNSNPYSAFQVDITIDIRPSQEDLEVVKNLILILKCKKSVNWVIKSFDVKGSLKIIAPNSIGFGKESERSMTMTKSIRDDIPSTQGNLVKWALDNGYSPITSYTMAPVANRFHLRLENNAEEMGDEEVHTIPPELRILLDPGALPALQNPPIRGGEGQNGGLPFPFPDISRRVWNEEGEDGLPRPKDPVIPSIQLFPGLREPEEVQGSVDIALSVKCDNEKMIVAVEKDSFQASGYSGMDVTLLDPTCKAKMNGTHFVLESPLNGCGTRPRWSALDGVVYYNSIVIQVPALGDSSGWPDGYEDLESGDNGFPGDMDEGDASLFTRPEIVVFNCSLQQVRNPSSFQEQPHGNITFNMELYNTDLFLVPSQGVFSVPENGHVYVEVSVTKAEQELGFAIQTCFISPYSNPDRMSHYTIIENICPKDESVKFYSPKRVHFPIPQADMDKKRFSFVFKPVFNTSLLFLQCELTLCTKMEKHPQKLPKCVPPDEACTSLDASIIWAMMQNKKTFTKPLAVIHHEAESKEKGPSMKEPNPISPPIFHGLDTLTVMGIAFAAFVIGALLTGALWYIYSHTGETAGRQQVPTSPPASENSSAAHSIGSTQSTPCSSSSTA

SEQ ID NO: 3107 - protein, 850 aa, Homo sapiens
MTSHYVIAIFALMSSCLATAGPEPGALCELSPVSASHPVQALMESFTVLSGCASRGTTGLPQEVHVLNLRTAGQGPGQLQREVTLHLNPISSVHIHHKSVVFLLNSPHPLVWHLKTERLATGVSRLFLVSEGSVVQFSSANFSLTAETEERNFPHGNEHLLNWARKEYGAVTSFTELKIARNIYIKVGEDQVFPPKCNIGKNFLSLNYLAEYLQPKAAEGCVMSSQPQNEEVHIIELITPNSNPYSAFQVDITIDIRPSQEDLEVVKNLILILKCKKSVNWVIKSFDVKGSLKIIAPNSIGFGKESERSMTMTKSIRDDIPSTQGNLVKWALDNGYSPITSYTMAPVANRFHLRLENNEEMGDEEVHTIPPELRILLDPGALPALQNPPIRGGEGQNGGLPFPFPDISRRVWNEEGEDGLPRPKDPVIPSIQLFPGLREPEEVQGSVDIALSVKCDNEKMIVAVEKDSFQASGYSGMDVTLLDPTCKAKMNGTHFVLESPLNGCGTRPRWSALDGVVYYNSIVIQVPALGDSSGWPDGYEDLESGDNGFPGDMDEGDASLFTRPEIVVFNCSLQQVRNPSSFQEQPHGNITFNMELYNTDLFLVPSQGVFSVPENGHVYVEVSVTKAEQELGFAIQTCFISPYSNPDRMSHYTIIENICPKDESVKFYSPKRVHFPIPQADMDKKRFSFVFKPVFNTSLLFLQCELTLCTKMEKHPQKLPKCVPPDEACTSLDASIIWAMMQNKKTFTKPLAVIHHEAESKEKGPSMKEPNPISPPIFHGLDTLTVMGIAFAAFVIGALLTGALWYIYSHTGETAGRQQVPTSPPASENSSAAHSIGSTQSTPCSSSSTA

SEQ ID NO: 3108 - protein, 767 aa, Homo sapiens
GPEPGALCELSPVSASHPVQALMESFTVLSGCASRGTTGLPQEVHVLNLRTAGQGPGQLQREVTLHLNPISSVHIHHKSVVFLLNSPHPLVWHLKTERLATGVSRLFLVSEGSVVQFSSANFSLTAETEERNFPHGNEHLLNWARKEYGAVTSFTELKIARNIYIKVGEDQVFPPKCNIGKNFLSLNYLAEYLQPKAAEGCVMSSQPQNEEVHIIELITPNSNPYSAFQVDITIDIRPSQEDLEVVKNLILILKCKKSVNWVIKSFDVKGSLKIIAPNSIGFGKESERSMTMTKSIRDDIPSTQGNLVKWALDNGYSPITSYTMAPVANRFHLRLENNAEEMGDEEVHTIPPELRILLDPGALPALQNPPIRGGEGQNGGLPFPFPDISRRVWNEEGEDGLPRPKDPVIPSIQLFPGLREPEEVQGSVDIALSVKCDNEKMIVAVEKDSFQASGYSGMDVTLLDPTCKAKMNGTHFVLESPLNGCGTRPRWSALDGVVYYNSIVIQVPALGDSSGWPDGYEDLESGDNGFPGDMDEGDASLFTRPEIVVFNCSLQQVRNPSSFQEQPHGNITFNMELYNTDLFLVPSQGVFSVPENGHVYVEVSVTKAEQELGFAIQTCFISPYSNPDRMSHYTIIENICPKDESVKFYSPKRVHFPIPQADMDKKRFSFVFKPVFNTSLLFLQCELTLCTKMEKHPQKLPKCVPPDEACTSLDASIIWAMMQNKKTFTKPLAVIHHEAESKEKGPSMKEPNPISPPIFHGLDTLTV

SEQ ID NO: 3109-3116 - skipped (8 entries)

SEQ ID NO: 3117 - protein, 361 aa, Homo sapiens
LSTCKTIDMELVKRKRIEAIRGQILSKLRLASPPSQGEVPPGPLPEAVLALYNSTRDRVAGESAEPEPEPEADYYAKEVTRVLMVETHNEIYDKFKQSTHSIYMFFNTSELREAVPEPVLLSRAELRLLRLKLKVEQHVELYQKYSNNSWRYLSNRLLAPSDSPEWLSFDVTGVVRQWLSRGGEIEGFRLSAHCSCDSRDNTLQVDINGFTTGRRGDLATIHGMNRPFLLLMATPLERAQHLQSSRHRRALDTNYCFSSTEKNCCVRQLYIDFRKDLGWKWIHEPKGYHANFCLGPCPYIWSLDTQYSKVLALYNQHNPGASAAPCCVPQALEPLPIVYYVGRKPKVEQLSNMIVRSCKCS

SEQ ID NO: 3118 - protein, 394 aa, Homo sapiens
LSTCSTLDMDQFMRKRIEAIRGQILSKLKLTSPPEDYPEPEEVPPEVISIYNSTRDLLQEKASRRAAACERERSDEEYYAKEVYKIDMPPFFPSENAIPPTFYRPYFRIVRFDVSAMEKNASNLVKAEFRVFRLQNPKARVPEQRIELYQILKSKDLTSPTQRYIDSKVVKTRAEGEWLSFDVTDAVHEWLHHKDRNLGFKISLHCPCCTFVPSNNYIIPNKSEELEARFAGIDGTSTYTSGDQKTIKSTRKKNSGKTPHLLLMLLPSYRLESQQTNRRKKRALDAAYCFRNVQDNCCLRPLYIDFKRDLGWKWIHEPKGYNANFCAGACPYLWSSDTQHSRVLSLYNTINPEASASPCCVSQDLEPLTILYYIGKTPKIEQLSNMIVKSCKCS

SEQ ID NO: 3119 - protein, 389 aa, Homo sapiens
LSTCTTLDFGHIKKKRVEAIRGQILSKLRLTSPPEPTVMTHVPYQVLALYNSTRELLEEMHGEREEGCTQENTESEYYAKEIHKFDMIQGLAEHNELAVCPKGITSKVFRFNVSSVEKNRTNLFRAEFRVLRVPNPSSKRNEQRIELFQILRPDEHIAKQRYIGGKNLPTRGTAEWLSFDVTDTVREWLLRRESNLGLEISIHCPCHTFQPNGDILENIHEVMEIKFKGVDNEDDHGRGDLGRLKKQKDHHNPHLILMMIPPHRLDNPGQGGQRKKRALDTNYCFRNLEENCCVRPLYIDFRQDLGWKWVHEPKGYYANFCSGPCPYLRSADTTHSTVLGLYNTLNPEASASPCCVPQDLEPLTILYYVGRTPKVEQLSNMVVKSCKCS

SEQ ID NO: 3120 - protein, 470 aa, Homo sapiens
LQCFCHLCTKDNFTCVTDGLCFVSVTETTDKVIHNSMCIAEIDLIPRDRPFVCAPSSKTGSVTTTYCCNQDHCNKIELPTTVKSSPGLGPVELAAVIAGPVCFVCISLMLMVYICHNRTVIHHRVPNEEDPSLDRPFISEGTTLKDLIYDMTTSGSGSGLPLLVQRTIARTIVLQESIGKGRFGEVWRGKWRGEEVAVKIFSSREERSWFREAEIYQTVMLRHENILGFIAADNKDNGTWTQLWLVSDYHEHGSLFDYLNRYTVTVEGMIKLALSTASGLAHLHMEIVGTQGKPAIAHRDLKSKNILVKKNGTCCIADLGLAVRHDSATDTIDIAPNHRVGTKRYMAPEVLDDSINMKHFESFKRADIYAMGLVFWEIARRCSIGGIHEDYQLPYYDLVPSDPSVEEMRKVVCEQKLRPNIPNRWQSCEALRVMAKIMRECWYANGAARLTALRIKKTLSQLSQQEGIKM

SEQ ID NO: 3121 - protein, 474 aa, Homo sapiens
LQCFCHLCTKDNFTCVTDGLCFVSVTETTDKVIHNSMCIAEIDLIPRDRPFVCAPSSKTGSVTTTYCCNQDHCNKIELPTTGPFSVKSSPGLGPVELAAVIAGPVCFVCISLMLMVYICHNRTVIHHRVPNEEDPSLDRPFISEGTTLKDLIYDMTTSGSGSGLPLLVQRTIARTIVLQESIGKGRFGEVWRGKWRGEEVAVKIFSSREERSWFREAEIYQTVMLRHENILGFIAADNKDNGTWTQLWLVSDYHEHGSLFDYLNRYTVTVEGMIKLALSTASGLAHLHMEIVGTQGKPAIAHRDLKSKNILVKKNGTCCIADLGLAVRHDSATDTIDIAPNHRVGTKRYMAPEVLDDSINMKHFESFKRADIYAMGLVFWEIARRCSIGGIHEDYQLPYYDLVPSDPSVEEMRKVVCEQKLRPNIPNRWQSCEALRVMAKIMRECWYANGAARLTALRIKKTLSQLSQQEGIKM

SEQ ID NO: 3122 - protein, 393 aa, Homo sapiens
LQCFCHLCTKDNFTCVTDGLCFVSVTETTDKVIHNSMCIAEIDLIPRDRPFVCAPSSKTGSVTTTYCCNQDHCNKIELPTTGLPLLVQRTIARTIVLQESIGKGRFGEVWRGKWRGEEVAVKIFSSREERSWFREAEIYQTVMLRHENILGFIAADNKDNGTWTQLWLVSDYHEHGSLFDYLNRYTVTVEGMIKLALSTASGLAHLHMEIVGTQGKPAIAHRDLKSKNILVKKNGTCCIADLGLAVRHDSATDTIDIAPNHRVGTKRYMAPEVLDDSINMKHFESFKRADIYAMGLVFWEIARRCSIGGIHEDYQLPYYDLVPSDPSVEEMRKVVCEQKLRPNIPNRWQSCEALRVMAKIMRECWYANGAARLTALRIKKTLSQLSQQEGIKM

SEQ ID NO: 3123 - protein, 545 aa, Homo sapiens
TIPPHVQKSVNNDMIVTDNNGAVKFPQLCKFCDVRFSTCDNQKSCMSNCSITSICEKPQEVCVAVWRKNDENITLETVCHDPKLPYHDFILEDAASPKCIMKEKKKPGETFFMCSCSSDECNDNIIFSEEYNTSNPDLLLVIFQVTGISLLPPLGVAISVIIIFYCYRVNRQQKLSSTWETGKTRKLMEFSEHCAIILEDDRSDISSTCANNINHNTELLPIELDTLVGKGRFAEVYKAKLKQNTSEQFETVAVKIFPYEEYASWKTEKDIFSDINLKHENILQFLTAEERKTELGKQYWLITAFHAKGNLQEYLTRHVISWEDLRKLGSSLARGIAHLHSDHTPCGRPKMPIVHRDLKSSNILVKNDLTCCLCDFGLSLRLDPTLSVDDLANSGQVGTARYMAPEVLESRMNLENVESFKQTDVYSMALVLWEMTSRCNAVGEVKDYEPPFGSKVREHPCVESMKDNVLRDRGRPEIPSFWLNHQGIQMVCETLTECWDHDPEARLTAQCVAERFSELEHLDRLSGRSCSEEKIPEDGSLNTTK

SEQ ID NO: 3124 - protein, 570 aa, Homo sapiens
TIPPHVQKSDVEMEAQKDEIICPSCNRTAHPLRHINNDMIVTDNNGAVKFPQLCKFCDVRFSTCDNQKSCMSNCSITSICEKPQEVCVAVWRKNDENITLETVCHDPKLPYHDFILEDAASPKCIMKEKKKPGETFFMCSCSSDECNDNIIFSEEYNTSNPDLLLVIFQVTGISLLPPLGVAISVIIIFYCYRVNRQQKLSSTWETGKTRKLMEFSEHCAIILEDDRSDISSTCANNINHNTELLPIELDTLVGKGRFAEVYKAKLKQNTSEQFETVAVKIFPYEEYASWKTEKDIFSDINLKHENILQFLTAEERKTELGKQYWLITAFHAKGNLQEYLTRHVISWEDLRKLGSSLARGIAHLHSDHTPCGRPKMPIVHRDLKSSNILVKNDLTCCLCDFGLSLRLDPTLSVDDLANSGQVGTARYMAPEVLESRMNLENVESFKQTDVYSMALVLWEMTSRCNAVGEVKDYEPPFGSKVREHPCVESMKDNVLRDRGRPEIPSFWLNHQGIQMVCETLTECWDHDPEARLTAQCVAERFSELEHLDRLSGRSCSEEKIPEDGSLNTTK

SEQ ID NO: 3125 - protein, 831 aa, Homo sapiens
GPEPGALCELSPVSASHPVQALMESFTVLSGCASRGTTGLPQEVHVLNLRTAGQGPGQLQREVTLHLNPISSVHIHHKSVVFLLNSPHPLVWHLKTERLATGVSRLFLVSEGSVVQFSSANFSLTAETEERNFPHGNEHLLNWARKEYGAVTSFTELKIARNIYIKVGEDQVFPPKCNIGKNFLSLNYLAEYLQPKAAEGCVMSSQPQNEEVHIIELITPNSNPYSAFQVDITIDIRPSQEDLEVVKNLILILKCKKSVNWVIKSFDVKGSLKIIAPNSIGFGKESERSMTMTKSIRDDIPSTQGNLVKWALDNGYSPITSYTMAPVANRFHLRLENNAEEMGDEEVHTIPPELRILLDPGALPALQNPPIRGGEGQNGGLPFPFPDISRRVWNEEGEDGLPRPKDPVIPSIQLFPGLREPEEVQGSVDIALSVKCDNEKMIVAVEKDSFQASGYSGMDVTLLDPTCKAKMNGTHFVLESPLNGCGTRPRWSALDGVVYYNSIVIQVPALGDSSGWPDGYEDLESGDNGFPGDMDEGDASLFTRPEIVVFNCSLQQVRNPSSFQEQPHGNITFNMELYNTDLFLVPSQGVFSVPENGHVYVEVSVTKAEQELGFAIQTCFISPYSNPDRMSHYTIIENICPKDESVKFYSPKRVHFPIPQADMDKKRFSFVFKPVFNTSLLFLQCELTLCTKMEKHPQKLPKCVPPDEACTSLDASIIWAMMQNKKTFTKPLAVIHHEAESKEKGPSMKEPNPISPPIFHGLDTLTVMGIAFAAFVIGALLTGALWYIYSHTGETAGRQQVPTSPPASENSSAAHSIGSTQSTPCSSSSTA

SEQ ID NO: 3126 - protein, 830 aa, Homo sapiens
GPEPGALCELSPVSASHPVQALMESFTVLSGCASRGTTGLPQEVHVLNLRTAGQGPGQLQREVTLHLNPISSVHIHHKSVVFLLNSPHPLVWHLKTERLATGVSRLFLVSEGSVVQFSSANFSLTAETEERNFPHGNEHLLNWARKEYGAVTSFTELKIARNIYIKVGEDQVFPPKCNIGKNFLSLNYLAEYLQPKAAEGCVMSSQPQNEEVHIIELITPNSNPYSAFQVDITIDIRPSQEDLEVVKNLILILKCKKSVNWVIKSFDVKGSLKIIAPNSIGFGKESERSMTMTKSIRDDIPSTQGNLVKWALDNGYSPITSYTMAPVANRFHLRLENNEEMGDEEVHTIPPELRILLDPGALPALQNPPIRGGEGQNGGLPFPFPDISRRVWNEEGEDGLPRPKDPVIPSIQLFPGLREPEEVQGSVDIALSVKCDNEKMIVAVEKDSFQASGYSGMDVTLLDPTCKAKMNGTHFVLESPLNGCGTRPRWSALDGVVYYNSIVIQVPALGDSSGWPDGYEDLESGDNGFPGDMDEGDASLFTRPEIVVFNCSLQQVRNPSSFQEQPHGNITFNMELYNTDLFLVPSQGVFSVPENGHVYVEVSVTKAEQELGFAIQTCFISPYSNPDRMSHYTIIENICPKDESVKFYSPKRVHFPIPQADMDKKRFSFVFKPVFNTSLLFLQCELTLCTKMEKHPQKLPKCVPPDEACTSLDASIIWAMMQNKKTFTKPLAVIHHEAESKEKGPSMKEPNPISPPIFHGLDTLTVMGIAFAAFVIGALLTGALWYIYSHTGETAGRQQVPTSPPASENSSAAHSIGSTQSTPCSSSSTA

SEQ ID NO: 3127-3191 - skipped (65 entries)

SEQ ID NO: 3192 - protein, 481 aa, synthetic construct
  VARIANT 330: note = Lys or absent
ASTKGPSVFPLAPSSKSTSGGTAALGCLVKDYFPEPVTVSWNSGALTSGVHTFPAVLQSSGLYSLSSVVTVPSSSLGTQTYICNVNHKPSNTKVDKRVEPKSCDKTHTCPPCPAPELLGGPSVFLFPPKPKDTLMISRTPEVTCVVVDVSHEDPEVKFNWYVDGVEVHNAKTKPREEQYNSTYRVVSVLTVLHQDWLNGKEYKCKVSNKALPAPIEKTISKAKGQPREPQVCTLPPSREEMTKNQVSLSCAVKGFYPSDIAVEWESNGQPENNYKTTPPVLDSDGSFFLVSKLTVDKSRWQQGNVFSCSVMHEALHNHYTQKSLSLSPGXGGGGSGGGGSGGGGSIPPHVQKSVNNDMIVTDNNGAVKFPQLCKFCDVRFSTCDNQKSCMSNCSITSICEKPQEVCVAVWRKNDENITLETVCHDPKLPYHDFILEDAASPKCIMKEKKKPGETFFMCSCSSDECNDNIIFSEEYNTSNPD

SEQ ID NO: 3193 - protein, 481 aa, synthetic construct
  VARIANT 330: note = Lys or absent
ASTKGPSVFPLAPSSKSTSGGTAALGCLVKDYFPEPVTVSWNSGALTSGVHTFPAVLQSSGLYSLSSVVTVPSSSLGTQTYICNVNHKPSNTKVDKRVEPKSCDKTHTCPPCPAPELLGGPSVFLFPPKPKDTLMISRTPEVTCVVVDVSHEDPEVKFNWYVDGVEVHNAKTKPREEQYNSTYRVVSVLTVLHQDWLNGKEYKCKVSNKALPAPIEKTISKAKGQPREPQVYTLPPCREEMTKNQVSLWCLVKGFYPSDIAVEWESNGQPENNYKTTPPVLDSDGSFFLYSKLTVDKSRWQQGNVFSCSVMHEALHNHYTQKSLSLSPGXGGGGSGGGGSGGGGSIPPHVQKSVNNDMIVTDNNGAVKFPQLCKFCDVRFSTCDNQKSCMSNCSITSICEKPQEVCVAVWRKNDENITLETVCHDPKLPYHDFILEDAASPKCIMKEKKKPGETFFMCSCSSDECNDNIIFSEEYNTSNPD

SEQ ID NO: 3194 - protein, 378 aa, synthetic construct
  VARIANT 227: note = Lys or absent
DKTHTCPPCPAPELLGGPSVFLFPPKPKDTLMISRTPEVTCVVVDVSHEDPEVKFNWYVDGVEVHNAKTKPREEQYNSTYRVVSVLTVLHQDWLNGKEYKCKVSNKALPAPIEKTISKAKGQPREPQVCTLPPSREEMTKNQVSLSCAVKGFYPSDIAVEWESNGQPENNYKTTPPVLDSDGSFFLVSKLTVDKSRWQQGNVFSCSVMHEALHNHYTQKSLSLSPGXGGGGSGGGGSGGGGSIPPHVQKSVNNDMIVTDNNGAVKFPQLCKFCDVRFSTCDNQKSCMSNCSITSICEKPQEVCVAVWRKNDENITLETVCHDPKLPYHDFILEDAASPKCIMKEKKKPGETFFMCSCSSDECNDNIIFSEEYNTSNPD

SEQ ID NO: 3195 - protein, 378 aa, synthetic construct
  VARIANT 227: note = Lys or absent
DKTHTCPPCPAPELLGGPSVFLFPPKPKDTLMISRTPEVTCVVVDVSHEDPEVKFNWYVDGVEVHNAKTKPREEQYNSTYRVVSVLTVLHQDWLNGKEYKCKVSNKALPAPIEKTISKAKGQPREPQVYTLPPCREEMTKNQVSLWCLVKGFYPSDIAVEWESNGQPENNYKTTPPVLDSDGSFFLYSKLTVDKSRWQQGNVFSCSVMHEALHNHYTQKSLSLSPGXGGGGSGGGGSGGGGSIPPHVQKSVNNDMIVTDNNGAVKFPQLCKFCDVRFSTCDNQKSCMSNCSITSICEKPQEVCVAVWRKNDENITLETVCHDPKLPYHDFILEDAASPKCIMKEKKKPGETFFMCSCSSDECNDNIIFSEEYNTSNPD

SEQ ID NO: 3196 - protein, 481 aa, synthetic construct
  VARIANT 481: note = Lys or absent
IPPHVQKSVNNDMIVTDNNGAVKFPQLCKFCDVRFSTCDNQKSCMSNCSITSICEKPQEVCVAVWRKNDENITLETVCHDPKLPYHDFILEDAASPKCIMKEKKKPGETFFMCSCSSDECNDNIIFSEEYNTSNPDGGGGSGGGGSGGGGSASTKGPSVFPLAPSSKSTSGGTAALGCLVKDYFPEPVTVSWNSGALTSGVHTFPAVLQSSGLYSLSSVVTVPSSSLGTQTYICNVNHKPSNTKVDKRVEPKSCDKTHTCPPCPAPELLGGPSVFLFPPKPKDTLMISRTPEVTCVVVDVSHEDPEVKFNWYVDGVEVHNAKTKPREEQYNSTYRVVSVLTVLHQDWLNGKEYKCKVSNKALPAPIEKTISKAKGQPREPQVCTLPPSREEMTKNQVSLSCAVKGFYPSDIAVEWESNGQPENNYKTTPPVLDSDGSFFLVSKLTVDKSRWQQGNVFSCSVMHEALHNHYTQKSLSLSPGX

SEQ ID NO: 3197 - protein, 481 aa, synthetic construct
  VARIANT 481: note = Lys or absent
IPPHVQKSVNNDMIVTDNNGAVKFPQLCKFCDVRFSTCDNQKSCMSNCSITSICEKPQEVCVAVWRKNDENITLETVCHDPKLPYHDFILEDAASPKCIMKEKKKPGETFFMCSCSSDECNDNIIFSEEYNTSNPDGGGGSGGGGSGGGGSASTKGPSVFPLAPSSKSTSGGTAALGCLVKDYFPEPVTVSWNSGALTSGVHTFPAVLQSSGLYSLSSVVTVPSSSLGTQTYICNVNHKPSNTKVDKRVEPKSCDKTHTCPPCPAPELLGGPSVFLFPPKPKDTLMISRTPEVTCVVVDVSHEDPEVKFNWYVDGVEVHNAKTKPREEQYNSTYRVVSVLTVLHQDWLNGKEYKCKVSNKALPAPIEKTISKAKGQPREPQVYTLPPCREEMTKNQVSLWCLVKGFYPSDIAVEWESNGQPENNYKTTPPVLDSDGSFFLYSKLTVDKSRWQQGNVFSCSVMHEALHNHYTQKSLSLSPGX

SEQ ID NO: 3198 - protein, 257 aa, synthetic construct
IPPHVQKSVNNDMIVTDNNGAVKFPQLCKFCDVRFSTCDNQKSCMSNCSITSICEKPQEVCVAVWRKNDENITLETVCHDPKLPYHDFILEDAASPKCIMKEKKKPGETFFMCSCSSDECNDNIIFSEEYNTSNPDGGGGSGGGGSGGGGSGQPKANPTVTLFPPSSEELQANKATLVCLISDFYPGAVTVAWKADGSPVKAGVETTKPSKQSNNKYAASSYLSLTPEQWKSHRSYSCQVTHEGSTVEKTVAPTECS

SEQ ID NO: 3199 - protein, 258 aa, synthetic construct
IPPHVQKSVNNDMIVTDNNGAVKFPQLCKFCDVRFSTCDNQKSCMSNCSITSICEKPQEVCVAVWRKNDENITLETVCHDPKLPYHDFILEDAASPKCIMKEKKKPGETFFMCSCSSDECNDNIIFSEEYNTSNPDGGGGSGGGGSGGGGSRTVAAPSVFIFPPSDEQLKSGTASVVCLLNNFYPREAKVQWKVDNALQSGNSQESVTEQDSKDSTYSLSSTLTLSKADYEKHKVYACEVTHQGLSSPVTKSFNRGEC

SEQ ID NO: 3200-5999 - skipped (2800 entries)

SEQ ID NO: 6000 - protein, 7 aa, synthetic construct
TGGYHWN

SEQ ID NO: 6001 - protein, 16 aa, synthetic construct
YIYSSGSTSYNPSLKS

SEQ ID NO: 6002 - protein, 8 aa, synthetic construct
GNWHYFDF

SEQ ID NO: 6003 - protein, 30 aa, synthetic construct
QIQLQESGPGLVKPSQSLSLTCSVTGFSIN

SEQ ID NO: 6004 - protein, 14 aa, synthetic construct
WIRQFPGKKLEWMG

SEQ ID NO: 6005 - protein, 32 aa, synthetic construct
RISITRDTSKNQFFLQLNSVTTEDTATYYCAR

SEQ ID NO: 6006 - protein, 11 aa, synthetic construct
WGQGTMVTVSS

SEQ ID NO: 6007 - protein, 7 aa, synthetic construct
TGGYHWN

SEQ ID NO: 6008 - protein, 16 aa, synthetic construct
YIYSSGTTRYNPSLKS

SEQ ID NO: 6009 - protein, 8 aa, synthetic construct
GNWHYFDY

SEQ ID NO: 6010 - protein, 30 aa, synthetic construct; identical to SEQ ID NO: 6003

SEQ ID NO: 6011 - protein, 14 aa, synthetic construct
WIRQFPGKKLEWMG

SEQ ID NO: 6012 - protein, 32 aa, synthetic construct
RISITRDTSKNQFFLQLNSVTPEDTATYYCTR

SEQ ID NO: 6013 - protein, 11 aa, synthetic construct
WGQGTLVAVSS

SEQ ID NO: 6014 - protein, 30 aa, synthetic construct
QIQLQESGPGLVKPSETLSLTCTVSGFSIN

SEQ ID NO: 6015 - protein, 14 aa, synthetic construct
WIRQPAGKGLEWIG

SEQ ID NO: 6016 - protein, 32 aa, synthetic construct
RVTMSRDTSKNQFSLKLSSVTAADTAVYYCAR

SEQ ID NO: 6017 - protein, 11 aa, synthetic construct
WGQGTMVTVSS

SEQ ID NO: 6018 - protein, 30 aa, synthetic construct
QIQLQESGPGLVKPSQTLSLTCTVSGFSIN

SEQ ID NO: 6019 - protein, 14 aa, synthetic construct
WIRQHPGKGLEWIG

SEQ ID NO: 6020 - protein, 32 aa, synthetic construct
LVTISRDTSKNQFSLKLSSVTAADTAVYYCAR

SEQ ID NO: 6021 - protein, 11 aa, synthetic construct
WGQGTMVTVSS

SEQ ID NO: 6022 - protein, 30 aa, synthetic construct
EIQLLESGGGLVQPGGSLRLSCAVSGFSIN

SEQ ID NO: 6023 - protein, 14 aa, synthetic construct
WVRQAPGKGLEWVG

SEQ ID NO: 6024 - protein, 32 aa, synthetic construct; identical to SEQ ID NO: 22

SEQ ID NO: 6025 - protein, 11 aa, synthetic construct
WGQGTMVTVSS

SEQ ID NO: 6026 - protein, 30 aa, synthetic construct
QIQLVQSGAEVKKPGSSVKVSCKVSGFSIN

SEQ ID NO: 6027 - protein, 14 aa, synthetic construct
WVRQAPGQGLEWMG

SEQ ID NO: 6028 - protein, 32 aa, synthetic construct
RVTITRDTSTNTFYMELSSLRSEDTAVYYCAR

SEQ ID NO: 6029 - protein, 11 aa, synthetic construct
WGQGTMVTVSS

SEQ ID NO: 6030 - protein, 30 aa, synthetic construct
EIQLVESGGGLVQPGGSLRLSCAVSGFSIN

SEQ ID NO: 6031 - skipped

SEQ ID NO: 6032 - protein, 14 aa, synthetic construct
WVRQAPGKGLEWVG

SEQ ID NO: 6033 - protein, 32 aa, synthetic construct
RFTISRDTAKNSFYLQMNSLRAEDTAVYYCAR

SEQ ID NO: 6034 - protein, 11 aa, synthetic construct
WGQGTMVTVSS

SEQ ID NO: 6035 - protein, 30 aa, synthetic construct
QIQLVQSGAEVKKPGASVKVSCKVSGFSIN

SEQ ID NO: 6036 - protein, 14 aa, synthetic construct
WVRQAPGQGLEWMG

SEQ ID NO: 6037 - protein, 32 aa, synthetic construct
RVTMTRDTSTNTFYMELSSLRSEDTAVYYCAR

SEQ ID NO: 6038 - protein, 11 aa, synthetic construct
WGQGTMVTVSS

SEQ ID NO: 6039 - protein, 30 aa, synthetic construct; identical to SEQ ID NO: 6018

SEQ ID NO: 6040 - protein, 14 aa, synthetic construct
WIRQHPGKGLEWIG

SEQ ID NO: 6041 - protein, 32 aa, synthetic construct; identical to SEQ ID NO: 6020

SEQ ID NO: 6042 - protein, 11 aa, synthetic construct
WGQGTLVTVSS

SEQ ID NO: 6043 - protein, 30 aa, synthetic construct; identical to SEQ ID NO: 6014

SEQ ID NO: 6044 - protein, 14 aa, synthetic construct
WIRQPAGKGLEWIG

SEQ ID NO: 6045 - protein, 32 aa, synthetic construct; identical to SEQ ID NO: 6016

SEQ ID NO: 6046 - protein, 11 aa, synthetic construct
WGQGTLVTVSS

SEQ ID NO: 6047 - protein, 30 aa, synthetic construct; identical to SEQ ID NO: 6022

SEQ ID NO: 6048 - protein, 14 aa, synthetic construct
WVRQAPGKGLEWVG

SEQ ID NO: 6049 - protein, 32 aa, synthetic construct; identical to SEQ ID NO: 22

SEQ ID NO: 6050 - protein, 11 aa, synthetic construct
WGQGTLVTVSS

SEQ ID NO: 6051 - protein, 30 aa, synthetic construct
QIQLVESGGGLVKPGGSLRLSCAVSGFSIN

SEQ ID NO: 6052 - protein, 14 aa, synthetic construct
WIRQAPGKGLEWVG

SEQ ID NO: 6053 - protein, 32 aa, synthetic construct; identical to SEQ ID NO: 6033

SEQ ID NO: 6054 - protein, 11 aa, synthetic construct
WGQGTLVTVSS

SEQ ID NO: 6055 - protein, 30 aa, synthetic construct; identical to SEQ ID NO: 6035

SEQ ID NO: 6056 - protein, 14 aa, synthetic construct
WVRQAPGQGLEWMG

SEQ ID NO: 6057 - protein, 32 aa, synthetic construct; identical to SEQ ID NO: 6037

SEQ ID NO: 6058 - protein, 11 aa, synthetic construct
WGQGTLVTVSS

SEQ ID NO: 6059 - protein, 30 aa, synthetic construct
EIQLVQSGAEVKKPGATVKISCKVSGFSIN

SEQ ID NO: 6060 - protein, 14 aa, synthetic construct
WVQQAPGKGLEWMG

SEQ ID NO: 6061 - protein, 32 aa, synthetic construct; identical to SEQ ID NO: 6028

SEQ ID NO: 6062 - protein, 11 aa, synthetic construct
WGQGTLVTVSS

SEQ ID NO: 6063 - protein, 11 aa, synthetic construct
SGERLSDKYVH

SEQ ID NO: 6064 - protein, 7 aa, synthetic construct
ENDKRPS

SEQ ID NO: 6065 - skipped

SEQ ID NO: 6066 - protein, 22 aa, synthetic construct
SYTLTQPPLLSVALGHKATITC

SEQ ID NO: 6067 - protein, 15 aa, synthetic construct
WYQQKPGRAPVMVIY

SEQ ID NO: 6068 - skipped

SEQ ID NO: 6069 - protein, 10 aa, synthetic construct
FGSGTQLTVL

SEQ ID NO: 6070 - protein, 11 aa, synthetic construct
SGENLSDKYVH

SEQ ID NO: 6071 - protein, 7 aa, synthetic construct
ENEKRPS

SEQ ID NO: 6072 - protein, 10 aa, synthetic construct
HYWESINSVV

SEQ ID NO: 6073 - protein, 22 aa, synthetic construct
SYTLTQPPSLSVAPGQKATIIC

SEQ ID NO: 6074 - protein, 15 aa, synthetic construct
WYQQKPGRAPVMVIY

SEQ ID NO: 6075 - protein, 32 aa, synthetic construct
GIPDQFSGSNSGNIATLTISKAQPGSEADYYC

SEQ ID NO: 6076 - protein, 10 aa, synthetic construct
FGSGTHLTVL

SEQ ID NO: 6077 - protein, 22 aa, synthetic construct
QSVTTQPPSVSGAPGQRVTISC

SEQ ID NO: 6078 - protein, 15 aa, synthetic construct
WYQQLPGTAPKMLIY

SEQ ID NO: 6079 - protein, 32 aa, synthetic construct
GVPDRFSGSNSGNSASLAITGLQAEDEADYYC

SEQ ID NO: 6080 - protein, 10 aa, synthetic construct
FGGGTQLTVL

SEQ ID NO: 6081 - protein, 22 aa, synthetic construct
QSVTTQPPSASGTPGQRVTISC

SEQ ID NO: 6082 - protein, 15 aa, synthetic construct
WYQQLPGTAPKMLIY

SEQ ID NO: 6083 - protein, 32 aa, synthetic construct
GVPDRFSGSNSGNSASLAISGLQSEDEADYYC

SEQ ID NO: 6084 - protein, 10 aa, synthetic construct
FGGGTQLTVL

SEQ ID NO: 6085 - protein, 22 aa, synthetic construct
QSVTTQPPSASGTPGQRVTISC

SEQ ID NO: 6086 - protein, 15 aa, synthetic construct
WYQQLPGTAPKMLIY

SEQ ID NO: 6087 - protein, 32 aa, synthetic construct
GVPDRFSGSNSGNSASLAISGLRSEDEADYYC

SEQ ID NO: 6088 - protein, 10 aa, synthetic construct
FGGGTQLTVL

SEQ ID NO: 6089 - protein, 22 aa, synthetic construct
SSETTQPHSVSVATAQMARITC

SEQ ID NO: 6090 - protein, 15 aa, synthetic construct
WYQQKPGQDPVMVIY

SEQ ID NO: 6091 - protein, 32 aa, synthetic construct
GIPERFSGSNPGNTATLTISRIEAGDEADYYC

SEQ ID NO: 6092 - protein, 10 aa, synthetic construct
FGGGTQLTVL

SEQ ID NO: 6093 - protein, 23 aa, synthetic construct
DIQMTQSPSTLSASVGDRVTITC

SEQ ID NO: 6094 - protein, 15 aa, synthetic construct
WYQQKPGKAPKMLIY

SEQ ID NO: 6095 - protein, 32 aa, synthetic construct
GVPSRFSGSNSGNEATLTISSLQPDDFATYYC

SEQ ID NO: 6096 - protein, 10 aa, synthetic construct
FGQGTKVEIK

SEQ ID NO: 6097 - protein, 22 aa, synthetic construct
QYVLTQPPSASGTPGQRVTISC

SEQ ID NO: 6098 - protein, 15 aa, synthetic construct
WYQQLPGTAPKMLIY

SEQ ID NO: 6099 - protein, 32 aa, synthetic construct; identical to SEQ ID NO: 6083

SEQ ID NO: 6100 - protein, 10 aa, synthetic construct
FGEGTELTVL

SEQ ID NO: 6101 - protein, 22 aa, synthetic construct
QYVLTQPPSASGTPGQRVTISC

SEQ ID NO: 6102 - protein, 15 aa, synthetic construct
WYQQLPGTAPKMLIY

SEQ ID NO: 6103 - protein, 32 aa, synthetic construct; identical to SEQ ID NO: 6087

SEQ ID NO: 6104 - protein, 10 aa, synthetic construct
FGEGTELTVL

SEQ ID NO: 6105 - protein, 22 aa, synthetic construct
SYELTQPPSVSVSPGQTASITC

SEQ ID NO: 6106 - protein, 15 aa, synthetic construct
WYQQKPGQSPVMVIY

SEQ ID NO: 6107 - protein, 32 aa, synthetic construct
GIPERFSGSNSGNTATLTISGTQAMDEADYYC

SEQ ID NO: 6108 - protein, 10 aa, synthetic construct
FGEGTELTVL

SEQ ID NO: 6109 - protein, 23 aa, synthetic construct
DYVLTQSPLSLPVTPGEPASISC

SEQ ID NO: 6110 - protein, 15 aa, synthetic construct
WYLQKPGQSPQMLIY

SEQ ID NO: 6111 - protein, 32 aa, synthetic construct
GVPDRFSGSNSGNDATLKISRVEAEDVGVYYC

SEQ ID NO: 6112 - protein, 10 aa, synthetic construct
FGQGTKVEIK

SEQ ID NO: 6113 - protein, 23 aa, synthetic construct
AYQLTQSPSSLSASVGDRVTITC

SEQ ID NO: 6114 - protein, 15 aa, synthetic construct
WYQQKPGKAPKMLIY

SEQ ID NO: 6115 - protein, 32 aa, synthetic construct
GVPSRFSGSNSGNDATLTISSLQPEDFATYYC

SEQ ID NO: 6116 - protein, 10 aa, synthetic construct
FGQGTKVEIK

SEQ ID NO: 6117 - protein, 23 aa, synthetic construct
EYVLTQSPATLSVSPGERATLSC

SEQ ID NO: 6118 - protein, 15 aa, synthetic construct
WYQQKPGQAPRMLIY

SEQ ID NO: 6119 - protein, 32 aa, synthetic construct
GIPARFSGSNSGNEATLTISSLQSEDFAVYYC

SEQ ID NO: 6120 - protein, 10 aa, synthetic construct
FGQGTKVEIK

SEQ ID NO: 6121 - protein, 118 aa, synthetic construct
QIQLQESGPGLVKPSQSLSLTCSVTGFSINTGGYHWNWIRQFPGKKLEWMGYIYSSGSTSYNPSLKSRISITRDTSKNQFFLQLNSVTTEDTATYYCARGNWHYFDFWGQGTMVTVSS

SEQ ID NO: 6122 - protein, 118 aa, synthetic construct
QIQLQESGPGLVKPSQSLSLTCSVTGFSINTGGYHWNWIRQFPGKKLEWMGYIYSSGTTRYNPSLKSRISITRDTSKNQFFLQLNSVTPEDTATYYCTRGNWHYFDYWGQGTLVAVSS

SEQ ID NO: 6123 - protein, 118 aa, synthetic construct
QIQLQESGPGLVKPSETLSLTCTVSGFSINTGGYHWNWIRQPAGKGLEWIGYIYSSGSTSYNPSLKSRVTMSRDTSKNQFSLKLSSVTAADTAVYYCARGNWHYFDFWGQGTMVTVSS

SEQ ID NO: 6124 - protein, 118 aa, synthetic construct
QIQLQESGPGLVKPSQTLSLTCTVSGFSINTGGYHWNWIRQHPGKGLEWIGYIYSSGSTSYNPSLKSLVTISRDTSKNQFSLKLSSVTAADTAVYYCARGNWHYFDFWGQGTMVTVSS

SEQ ID NO: 6125 - protein, 118 aa, synthetic construct
EIQLLESGGGLVQPGGSLRLSCAVSGFSINTGGYHWNWVRQAPGKGLEWVGYIYSSGSTSYNPSLKSRFTISRDTSKNTFYLQMNSLRAEDTAVYYCARGNWHYFDFWGQGTMVTVSS

SEQ ID NO: 6126 - protein, 118 aa, synthetic construct
QIQLVQSGAEVKKPGSSVKVSCKVSGFSINTGGYHWNWVRQAPGQGLEWMGYIYSSGSTSYNPSLKSRVTITRDTSTNTFYMELSSLRSEDTAVYYCARGNWHYFDFWGQGTMVTVSS

SEQ ID NO: 6127 - protein, 118 aa, synthetic construct
EIQLVESGGGLVQPGGSLRLSCAVSGFSINTGGYHWNWVRQAPGKGLEWVGYIYSSGSTSYNPSLKSRFTISRDTAKNSFYLQMNSLRAEDTAVYYCARGNWHYFDFWGQGTMVTVSS

SEQ ID NO: 6128 - protein, 118 aa, synthetic construct
QIQLVQSGAEVKKPGASVKVSCKVSGFSINTGGYHWNWVRQAPGQGLEWMGYIYSSGSTSYNPSLKSRVTMTRDTSTNTFYMELSSLRSEDTAVYYCARGNWHYFDFWGQGTMVTVSS

SEQ ID NO: 6129 - protein, 118 aa, synthetic construct
QIQLQESGPGLVKPSQTLSLTCTVSGFSINTGGYHWNWIRQHPGKGLEWIGYIYSSGTTRYNPSLKSLVTISRDTSKNQFSLKLSSVTAADTAVYYCARGNWHYFDYWGQGTLVTVSS

SEQ ID NO: 6130 - protein, 118 aa, synthetic construct
QIQLQESGPGLVKPSETLSLTCTVSGFSINTGGYHWNWIRQPAGKGLEWIGYIYSSGTTRYNPSLKSRVTMSRDTSKNQFSLKLSSVTAADTAVYYCARGNWHYFDYWGQGTLVTVSS

SEQ ID NO: 6131 - protein, 118 aa, synthetic construct
EIQLLESGGGLVQPGGSLRLSCAVSGFSINTGGYHWNWVRQAPGKGLEWVGYIYSSGTTRYNPSLKSRFTISRDTSKNTFYLQMNSLRAEDTAVYYCARGNWHYFDYWGQGTLVTVSS

SEQ ID NO: 6132 - protein, 118 aa, synthetic construct
QIQLVESGGGLVKPGGSLRLSCAVSGFSINTGGYHWNWIRQAPGKGLEWVGYIYSSGTTRYNPSLKSRFTISRDTAKNSFYLQMNSLRAEDTAVYYCARGNWHYFDYWGQGTLVTVSS

SEQ ID NO: 6133 - protein, 118 aa, synthetic construct
QIQLVQSGAEVKKPGASVKVSCKVSGFSINTGGYHWNWVRQAPGQGLEWMGYIYSSGTTRYNPSLKSRVTMTRDTSTNTFYMELSSLRSEDTAVYYCARGNWHYFDYWGQGTLVTVSS

SEQ ID NO: 6134 - protein, 118 aa, synthetic construct
EIQLVQSGAEVKKPGATVKISCKVSGFSINTGGYHWNWVQQAPGKGLEWMGYIYSSGTTRYNPSLKSRVTITRDTSTNTFYMELSSLRSEDTAVYYCARGNWHYFDYWGQGTLVTVSS

SEQ ID NO: 6135 - skipped

SEQ ID NO: 6136 - protein, 107 aa, synthetic construct
SYTLTQPPSLSVAPGQKATIICSGENLSDKYVHWYQQKPGRAPVMVIYENEKRPSGIPDQFSGSNSGNIATLTISKAQPGSEADYYCHYWESINSVVFGSGTHLTVL

SEQ ID NO: 6137 - protein, 107 aa, synthetic construct
QSVTTQPPSVSGAPGQRVTISCSGERLSDKYVHWYQQLPGTAPKMLIYENDKRPSGVPDRFSGSNSGNSASLAITGLQAEDEADYYCQSWDSTNSAVFGGGTQLTVL

SEQ ID NO: 6138 - protein, 107 aa, synthetic construct
QSVTTQPPSASGTPGQRVTISCSGERLSDKYVHWYQQLPGTAPKMLIYENDKRPSGVPDRFSGSNSGNSASLAISGLQSEDEADYYCQSWDSTNSAVFGGGTQLTVL

SEQ ID NO: 6139 - protein, 107 aa, synthetic construct
QSVTTQPPSASGTPGQRVTISCSGERLSDKYVHWYQQLPGTAPKMLIYENDKRPSGVPDRFSGSNSGNSASLAISGLRSEDEADYYCQSWDSTNSAVFGGGTQLTVL

SEQ ID NO: 6140 - protein, 107 aa, synthetic construct
SSETTQPHSVSVATAQMARITCSGERLSDKYVHWYQQKPGQDPVMVIYENDKRPSGIPERFSGSNPGNTATLTISRIEAGDEADYYCQSWDSTNSAVFGGGTQLTVL

SEQ ID NO: 6141 - protein, 108 aa, synthetic construct
DIQMTQSPSTLSASVGDRVTITCSGERLSDKYVHWYQQKPGKAPKMLIYENDKRPSGVPSRFSGSNSGNEATLTISSLQPDDFATYYCQSWDSTNSAVFGQGTKVEIK

SEQ ID NO: 6142 - protein, 107 aa, synthetic construct
QYVLTQPPSASGTPGQRVTISCSGENLSDKYVHWYQQLPGTAPKMLIYENEKRPSGVPDRFSGSNSGNSASLAISGLQSEDEADYYCHYWESINSVVFGEGTELTVL

SEQ ID NO: 6143 - protein, 107 aa, synthetic construct
QYVLTQPPSASGTPGQRVTISCSGENLSDKYVHWYQQLPGTAPKMLIYENEKRPSGVPDRFSGSNSGNSASLAISGLRSEDEADYYCHYWESINSVVFGEGTELTVL

SEQ ID NO: 6144 - protein, 107 aa, synthetic construct
SYELTQPPSVSVSPGQTASITCSGENLSDKYVHWYQQKPGQSPVMVIYENEKRPSGIPERFSGSNSGNTATLTISGTQAMDEADYYCHYWESINSVVFGEGTELTVL

SEQ ID NO: 6145 - protein, 108 aa, synthetic construct
DYVLTQSPLSLPVTPGEPASISCSGENLSDKYVHWYLQKPGQSPQMLIYENEKRPSGVPDRFSGSNSGNDATLKISRVEAEDVGVYYCHYWESINSVVFGQGTKVEIK

SEQ ID NO: 6146 - protein, 108 aa, synthetic construct
AYQLTQSPSSLSASVGDRVTITCSGENLSDKYVHWYQQKPGKAPKMLIYENEKRPSGVPSRFSGSNSGNDATLTISSLQPEDFATYYCHYWESINSVVFGQGTKVEIK

SEQ ID NO: 6147 - protein, 108 aa, synthetic construct
EYVLTQSPATLSVSPGERATLSCSGENLSDKYVHWYQQKPGQAPRMLIYENEKRPSGIPARFSGSNSGNEATLTISSLQSEDFAVYYCHYWESINSVVFGQGTKVEIK

SEQ ID NO: 6148 - protein, 448 aa, synthetic construct
QIQLQESGPGLVKPSQSLSLTCSVTGFSINTGGYHWNWIRQFPGKKLEWMGYIYSSGSTSYNPSLKSRISITRDTSKNQFFLQLNSVTTEDTATYYCARGNWHYFDFWGQGTMVTVSSASTKGPSVFPLAPSSKSTSGGTAALGCLVKDYFPEPVTVSWNSGALTSGVHTFPAVLQSSGLYSLSSVVTVPSSSLGTQTYICNVNHKPSNTKVDKRVEPKSCDKTHTCPPCPAPELLGGPSVFLFPPKPKDTLMISRTPEVTCVVVDVSHEDPEVKFNWYVDGVEVHNAKTKPREEQYASTYRVVSVLTVLHQDWLNGKEYKCKVSNKALPAPIEKTISKAKGQPREPQVCTLPPSREEMTKNQVSLSCAVKGFYPSDIAVEWESNGQPENNYKTTPPVLDSDGSFFLVSKLTVDKSRWQQGNVFSCSVMHEALHNHYTQKSLSLSPGK

SEQ ID NO: 6149 - protein, 448 aa, synthetic construct
QIQLQESGPGLVKPSQSLSLTCSVTGFSINTGGYHWNWIRQFPGKKLEWMGYIYSSGSTSYNPSLKSRISITRDTSKNQFFLQLNSVTTEDTATYYCARGNWHYFDFWGQGTMVTVSSASTKGPSVFPLAPSSKSTSGGTAALGCLVKDYFPEPVTVSWNSGALTSGVHTFPAVLQSSGLYSLSSVVTVPSSSLGTQTYICNVNHKPSNTKVDKRVEPKSCDKTHTCPPCPAPELLGGPSVFLFPPKPKDTLMISRTPEVTCVVVDVSHEDPEVKFNWYVDGVEVHNAKTKPREEQYNSTYRVVSVLTVLHQDWLNGKEYKCKVSNKALPAPIEKTISKAKGQPREPQVCTLPPSREEMTKNQVSLSCAVKGFYPSDIAVEWESNGQPENNYKTTPPVLDSDGSFFLVSKLTVDKSRWQQGNVFSCSVMHEALHNHYTQKSLSLSPGK

SEQ ID NO: 6150 - protein, 213 aa, synthetic construct
SYTLTQPPLLSVALGHKATITCSGERLSDKYVHWYQQKPGRAPVMVIYENDKRPSGIPDQFSGSNSGNIATLTISKAQAGYEADYYCQSWDSTNSAVFGSGTQLTVLGQPKANPTVTLFPPSSEELQANKATLVCLISDFYPGAVTVAWKADGSPVKAGVETTKPSKQSNNKYAASSYLSLTPEQWKSHRSYSCQVTHEGSTVEKTVAPTECS

SEQ ID NO: 6151 - protein, 448 aa, synthetic construct
QIQLQESGPGLVKPSQSLSLTCSVTGFSINTGGYHWNWIRQFPGKKLEWMGYIYSSGTTRYNPSLKSRISITRDTSKNQFFLQLNSVTPEDTATYYCTRGNWHYFDYWGQGTLVAVSSASTKGPSVFPLAPSSKSTSGGTAALGCLVKDYFPEPVTVSWNSGALTSGVHTFPAVLQSSGLYSLSSVVTVPSSSLGTQTYICNVNHKPSNTKVDKRVEPKSCDKTHTCPPCPAPELLGGPSVFLFPPKPKDTLMISRTPEVTCVVVDVSHEDPEVKFNWYVDGVEVHNAKTKPREEQYASTYRVVSVLTVLHQDWLNGKEYKCKVSNKALPAPIEKTISKAKGQPREPQVCTLPPSREEMTKNQVSLSCAVKGFYPSDIAVEWESNGQPENNYKTTPPVLDSDGSFFLVSKLTVDKSRWQQGNVFSCSVMHEALHNHYTQKSLSLSPGK

SEQ ID NO: 6152 - protein, 448 aa, synthetic construct
QIQLQESGPGLVKPSQSLSLTCSVTGFSINTGGYHWNWIRQFPGKKLEWMGYIYSSGTTRYNPSLKSRISITRDTSKNQFFLQLNSVTPEDTATYYCTRGNWHYFDYWGQGTLVAVSSASTKGPSVFPLAPSSKSTSGGTAALGCLVKDYFPEPVTVSWNSGALTSGVHTFPAVLQSSGLYSLSSVVTVPSSSLGTQTYICNVNHKPSNTKVDKRVEPKSCDKTHTCPPCPAPELLGGPSVFLFPPKPKDTLMISRTPEVTCVVVDVSHEDPEVKFNWYVDGVEVHNAKTKPREEQYNSTYRVVSVLTVLHQDWLNGKEYKCKVSNKALPAPIEKTISKAKGQPREPQVCTLPPSREEMTKNQVSLSCAVKGFYPSDIAVEWESNGQPENNYKTTPPVLDSDGSFFLVSKLTVDKSRWQQGNVFSCSVMHEALHNHYTQKSLSLSPGK

SEQ ID NO: 6153 - protein, 213 aa, synthetic construct
SYTLTQPPSLSVAPGQKATIICSGENLSDKYVHWYQQKPGRAPVMVIYENEKRPSGIPDQFSGSNSGNIATLTISKAQPGSEADYYCHYWESINSVVFGSGTHLTVLGQPKANPTVTLFPPSSEELQANKATLVCLISDFYPGAVTVAWKADGSPVKAGVETTKPSKQSNNKYAASSYLSLTPEQWKSHRSYSCQVTHEGSTVEKTVAPTECS

SEQ ID NO: 6154 - protein, 27 aa, synthetic construct
  VARIANT 12..26: note = EAAAK repeats may be deleted
AEAAAKEAAAKEAAAKEAAAKEAAAKA

SEQ ID NO: 6155-6174 - skipped (20 entries)

SEQ ID NO: 6175 - protein, 243 aa, synthetic construct
QVHLQESGPGLVKPSETLSLTCTVSDDSISSYYWSWIRQPPGKGLEWIGHISYSGSANYNPSLKSRVTISVDTSKNQFSLKLSSVTAADTAVYYCANWDDAFNIWGQGTMVTVSSGGGGSGGGGSGGGGSGGGGSEIVLTQSPGTLSLSPGERATLSCRASQSVSSSYLAWYQQKPGQAPRLLIYGASSRATGIPDRFSGSGSGTDFTLTISRLEPEDFAVYYCQQYGSSPWTFGQGTKVEIK

SEQ ID NO: 6176 - protein, 115 aa, synthetic construct
QVHLQESGPGLVKPSETLSLTCTVSDDSISSYYWSWIRQPPGKGLEWIGHISYSGSANYNPSLKSRVTISVDTSKNQFSLKLSSVTAADTAVYYCANWDDAFNIWGQGTMVTVSS

SEQ ID NO: 6177 - protein, 108 aa, synthetic construct
EIVLTQSPGTLSLSPGERATLSCRASQSVSSSYLAWYQQKPGQAPRLLIYGASSRATGIPDRFSGSGSGTDFTLTISRLEPEDFAVYYCQQYGSSPWTFGQGTKVEIK

SEQ ID NO: 6178 - protein, 250 aa, synthetic construct
EVQLVQSGAEVKEPGESLKISCKNSGYSFTNYWVGWVRQMPGKGLEWMGIIYPGDSDTRYSPSFQGQVTISADKSINTAYLQWSSLKASDTAMYYCGRLTMFRGIIIGYFDYWGQGTLVTVSSGGGGSGGGGSGGGGSGGGGSEIVLTQSPATLSLSPGERATLSCRASQSVSSYLAWYQQKPGQAPRLLIYDASNRATGIPARFSGSGSGTDFTLTISSLEPEDFAVYYCQQRSNWPWTFGQGTKVEIK

SEQ ID NO: 6179 - protein, 123 aa, synthetic construct
EVQLVQSGAEVKEPGESLKISCKNSGYSFTNYWVGWVRQMPGKGLEWMGIIYPGDSDTRYSPSFQGQVTISADKSINTAYLQWSSLKASDTAMYYCGRLTMFRGIIIGYFDYWGQGTLVTVSS

SEQ ID NO: 6180 - protein, 107 aa, synthetic construct
EIVLTQSPATLSLSPGERATLSCRASQSVSSYLAWYQQKPGQAPRLLIYDASNRATGIPARFSGSGSGTDFTLTISSLEPEDFAVYYCQQRSNWPWTFGQGTKVEIK

SEQ ID NO: 6181 - protein, 247 aa, synthetic construct
QVQLQQSGPELVKPGASVKMSCKASGYTFTDYVINWGKQRSGQGLEWIGEIYPGSGTNYYNEKFKAKATLTADKSSNIAYMQLSSLTSEDSAVYFCARRGRYGLYAMDYWGQGTSVTVSSGGGGSGGGGSGGGGSGGGGSDIQMTQTTSSLSASLGDRVTISCRASQDISNYLNWYQQKPDGTVKLLIYYTSRLHSGVPSRFSGSGSGTDYSLTINNLEQEDIATYFCQQGNTRPWTFGGGTKLEIK

SEQ ID NO: 6182 - protein, 120 aa, synthetic construct
QVQLQQSGPELVKPGASVKMSCKASGYTFTDYVINWGKQRSGQGLEWIGEIYPGSGTNYYNEKFKAKATLTADKSSNIAYMQLSSLTSEDSAVYFCARRGRYGLYAMDYWGQGTSVTVSS

SEQ ID NO: 6183 - protein, 107 aa, synthetic construct
DIQMTQTTSSLSASLGDRVTISCRASQDISNYLNWYQQKPDGTVKLLIYYTSRLHSGVPSRFSGSGSGTDYSLTINNLEQEDIATYFCQQGNTRPWTFGGGTKLEIK

SEQ ID NO: 6184 - protein, 239 aa, synthetic construct
EVQLVESGGGVVRPGGSLRLSCAASGFTFDDYGMSWVRQAPGKGLEWVSGINWNGGSTGYADSVKGRFTISRDNAKNSLYLQMNSLRAEDTAVYYCARGRSLLFDYWGQGTLVTVSRGGGGSGGGGSGGGGSSELTQDPAVSVALGQTVRITCQGDSLRSYYASWYQQKPGQAPVLVIYGKNNRPSGIPDRFSGSSSGNTASLTITGAQAEDEADYYCNSRDSSGNHVVFGGGTKLTVL

SEQ ID NO: 6185 - protein, 117 aa, synthetic construct
EVQLVESGGGVVRPGGSLRLSCAASGFTFDDYGMSWVRQAPGKGLEWVSGINWNGGSTGYADSVKGRFTISRDNAKNSLYLQMNSLRAEDTAVYYCARGRSLLFDYWGQGTLVTVSR

SEQ ID NO: 6186 - protein, 108 aa, synthetic construct
SSELTQDPAVSVALGQTVRITCQGDSLRSYYASWYQQKPGQAPVLVIYGKNNRPSGIPDRFSGSSSGNTASLTITGAQAEDEADYYCNSRDSSGNHVVFGGGTKLTVL

SEQ ID NO: 6187-7232 - skipped (1046 entries)

SEQ ID NO: 7233 - protein, 238 aa, unidentified
  source 1..238: note = NKp30 sequence
DLKVEMMAGGTQITPLNDNVTIFCNIFYSQPLNITSMGITWFWKSLTFDKEVKVFEFFGDHQEAFRPGAIVSPWRLKSGDASLRLPGIQLEEAGEYRCEVVVTPLKAQGTVQLEVVASPASRLLLDQVGMKENEDKYMCESSGFYPEAINITWEKQTQKFPHPIEISEDVITGPTIKNMDGTFNVTSCLKLNSSQEDPGTVYQCVVRHASLHTPLRSNFTLTAARHSLSETEKTDNFS

SEQ ID NO: 7234 - protein, 284 aa, unidentified
  source 1..284: note = MICA sequence
EPHSLRYNLTVLSWDGSVQSGFLTEVHLDGQPFLRCDRQKCRAKPQGQWAEDVLGNKTWDRETRDLTGNGKDLRMTLAHIKDQKEGLHSLQEIRVCEIHEDNSTRSSQHFYYDGELFLSQNLETKEWTMPQSSRAQTLAMNVRNFLKEDAMKTKTHYHAMHADCLQELRRYLKSGVVLRRTVPPMVNVTRSEASEGNITVTCRASGFYPWNITLSWRQDGVSLSHDTQQWGDVLPDGNGTYQTWVATRICQGEEQRFTCYMEHSGNHSTHPVPSGKVLVLQSHW

SEQ ID NO: 7235 - protein, 287 aa, unidentified
  source 1..287: note = MICB sequence
AEPHSLRYNLMVLSQDESVQSGFLAEGHLDGQPFLRYDRQKRRAKPQGQWAEDVLGAKTWDTETEDLTENGQDLRRTLTHIKDQKGGLHSLQEIRVCEIHEDSSTRGSRHFYYDGELFLSQNLETQESTVPQSSRAQTLAMNVTNFWKEDAMKTKTHYRAMQADCLQKLQRYLKSGVAIRRTVPPMVNVTCSEVSEGNITVTCRASSFYPRNITLTWRQDGVSLSHNTQQWGDVLPDGNGTYQTWVATRIRQGEEQRFTCYMEHSGNHGTHPVPSGKVLVLQSQRTD

SEQ ID NO: 7236 - protein, 191 aa, unidentified
  source 1..191: note = ULBP1 sequence
GWVDTHCLCYDFIITPKSRPEPQWCEVQGLVDERPFLHYDCVNHKAKAFASLGKKVNVTKTWEEQTETLRDVVDFLKGQLLDIQVENLIPIEPLTLQARMSCEHEAHGHGRGSWQFLFNGQKFLLFDSNNRKWTALHPGAKKMTEKWEKNRDVTMFFQKISLGDCKMWLEEFLMYWEQMLDPTKPPSLAPG

SEQ ID NO: 7237 - protein, 329 aa, unidentified
  source 1..329: note = NECTIN2 sequence
QDVRVQVLPEVRGQLGGTVELPCHLLPPVPGLYISLVTWQRPDAPANHQNVAAFHPKMGPSFPSPKPGSERLSFVSAKQSTGQDTEAELQDATLALHGLTVEDEGNYTCEFATFPKGSVRGMTWLRVIAKPKNQAEAQKVTFSQDPTTVALCISKEGRPPARISWLSSLDWEAKETQVSGTLAGTVTVTSRFTLVPSGRADGVTVTCKVEHESFEEPALIPVTLSVRYPPEVSISGYDDNWYLGRTDATLSCDVRSNPEPTGYDWSTTSGTFPTSAVAQGSQLVIHAVDSLFNTTFVCTVTNAVGMGRAEQVIFVRETPNTAGAGATGG

SEQ ID NO: 7238 - protein, 323 aa, unidentified
  source 1..323: note = NECL5 sequence
WPPPGTGDVVVQAPTQVPGFLGDSVTLPCYLQVPNMEVTHVSQLTWARHGESGSMAVFHQTQGPSYSESKRLEFVAARLGAELRNASLRMFGLRVEDEGNYTCLFVTFPQGSRSVDIWLRVLAKPQNTAEVQKVQLTGEPVPMARCVSTGGRPPAQITWHSDLGGMPNTSQVPGFLSGTVTVTSLWILVPSSQVDGKNVTCKVEHESFEKPQLLTVNLTVYYPPEVSISGYDNNWYLGQNEATLTCDARSNPEPTGYNWSTTMGPLPPFAVAQGAQLLIRPVDKPINTTLICNVTNALGARQAELTVQVKEGPPSEHSGISRN

SEQ ID NO: 7239 - protein, 330 aa, unidentified
  source 1..330: note = NECL2 sequence
QNLFTKDVTVIEGEVATISCQVNKSDDSVIQLLNPNRQTIYFRDFRPLKDSRFQLLNFSSSELKVSLTNVSISDEGRYFCQLYTDPPQESYTTITVLVPPRNLMIDIQKDTAVEGEEIEVNCTAMASKPATTIRWFKGNTELKGKSEVEEWSDMYTVTSQLMLKVHKEDDGVPVICQVEHPAVTGNLQTQRYLEVQYKPQVHIQMTYPLQGLTREGDALELTCEAIGKPQPVMVTWVRVDDEMPQHAVLSGPNLFINNLNKTDNGTYRCEASNIVGKAHSDYMLYVYDPPTTIPPPTTTTTTTTTTTTTILTIITDSRAGEEGSIRAVDH

SEQ ID NO: 7240 - protein, 155 aa, unidentified
  source 1..155: note = CD70 sequence
QRFAQAQQQLPLESLGWDVAELQLNHTGPQQDPRLYWQGGPALGRSFLHGPELDKGQLRIHRDGIYMVHIQVTLAICSSTTASRHHPTTLAVGICSPASRSISLLRLSFHQGCTIASQRLTPLARGDTLCTNLTGTLLPSRNTDETFFGVQWVRP

SEQ ID NO: 7241 - protein, 294 aa, unidentified
  source 1..294: note = L-selectin sequence
WTYHYSEKPMNWQRARRFCRDNYTDLVAIQNKAEIEYLEKTLPFSRSYYWIGIRKIGGIWTWVGTNKSLTEEAENWGDGEPNNKKNKEDCVEIYIKRNKDAGKWNDDACHKLKAALCYTASCQPWSCSGHGECVEIINNYTCNCDVGYYGPQCQFVIQCEPLEAPELGTMDCTHPLGNFSFSSQCAFSCSEGTNLTGIEETTCGPFGNWSSPEPTCQVIQCEPLSAPDLGIMNCSHPLASFSFTSACTFICSEGTELIGKKKTICESSGIWSNPSPICQKLDKSFSMIKEGDYN

SEQ ID NO: 7242 - protein, 243 aa, unidentified
  source 1..243: note = CD72 sequence
RYLQVSQQLQQTNRVLEVTNSSLRQQLRLKITQLGQSAEDLQGSRRELAQSQEALQVEQRAHQAAEGQLQACQADRQKTKETLQSEEQQRRALEQKLSNMENRLKPFFTCGSADTCCPSGWIMHQKSCFYISLTSKNWQESQKQCETLSSKLATFSEIYPQSHSYYFLNSLLPNGGSGNSYWTGLSSNKDWKLTDDTQRTRTYAQSSKCNKVHKTWSWWTLESESCRSSLPYICEMTAFRFPD

SEQ ID NO: 7243 - protein, 124 aa, unidentified
  source 1..124: note = CLEC2B sequence
KLTRDSQSLCPYDWIGFQNKCYYFSKEEGDWNSSKYNCSTQHADLTIIDNIEEMNFLRRYKCSSDHWIGLKMAKNRTGQWVDGATFTKSFGMRGSEGCAYLSDDGAATARCYTERKWICRKRIH

SEQ ID NO: 7244 - protein, 194 aa, unidentified
  source 1..194: note = CD48 sequence
QGHLVHMTVVSGSNVTLNISESLPENYKQLTWFYTFDQKIVEWDSRKSKYFESKFKGRVRLDPQSGALYISKVQKEDNSTYIMRVLKKTGNEQEWKIKLQVLDPVPKPVIKIEKIEDMDDNCYLKLSCVIPGESVNYTWYGDKRPFPKELQNSVLETTLMPHNYSRCYTCQVSNSVSSKNGTVCLSPPCTLARS

SEQ ID NO: 7245-7291 - skipped (47 entries)

SEQ ID NO: 7292 - protein, 32 aa, synthetic construct
GIPDQFSGSNSGNIATLTISKAQAGYEADYYC

SEQ ID NO: 7293 - protein, 10 aa, synthetic construct
QSWDSTNSAV

SEQ ID NO: 7294 - protein, 107 aa, synthetic construct
SYTLTQPPLLSVALGHKATITCSGERLSDKYVHWYQQKPGRAPVMVIYENDKRPSGIPDQFSGSNSGNIATLTISKAQAGYEADYYCQSWDSTNSAVFGSGTQLTVL

SEQ ID NO: 7295 - protein, 118 aa, synthetic construct
QIQLQESGPGLVKPSQSLSLSCSVTGFSINTGGYHWNWIRQFPGKKVEWMGYIYSSGTTKYNPSLKSRISITRDTSKNQFFLQLNSVTTEDTATYYCARGDWHYFDYWGQGTMVAVSS

SEQ ID NO: 7296 - protein, 107 aa, synthetic construct
SYTLTQPPLVSVALGQKATIICSGENLSDKYVHWYQQKPGRAPVMVIYENDKRPSGIPDQFSGSNSGNIATLTISKAQAGYEADYYCHCWDSTNSAVFGSGTHLTVL

SEQ ID NO: 7297 - protein, 118 aa, synthetic construct
QIQLQESGPGLVKPSQSLSLTCSVTGFSINTGGYHWNWIRQFPGKKLEWMGYIYSSGSTRYNPSLKSRFSITRDTSKNQFFLQLNSVTTEDTATYYCTRGNWHYFDYWGQGTLVAVSS

SEQ ID NO: 7298 - protein, 118 aa, synthetic construct
QIQLQESGPGLVKPSQSLSLSCSVTGFSITTTGYHWNWIRQFPGKKLEWMGYIYSSGSTSYNPSLKSRFSITRDTSKNQFFLQLNSVTTEDTATYYCARGDWHYFDYWGPGTMVTVSS

SEQ ID NO: 7299 - protein, 107 aa, synthetic construct
SFTLTQPPLVSVAVGQVATITCSGEKLSDKYVHWYQQKPGRAPVMVIYENDRRPSGIPDQFSGSNSGNIASLTISKAQAGDEADYFCQFWDSTNSAVFGGGTQLTVL

SEQ ID NO: 7300 - protein, 118 aa, synthetic construct
QIQLQESGPGLVKPSQTLSLTCTVSGFSITTTGYHWNWIRQHPGKGLEWIGYIYSSGSTSYNPSLKSLVTISRDTSKNQFSLKLSSVTAADTAVYYCARGDWHYFDYWGQGTMVTVSS

SEQ ID NO: 7301 - protein, 118 aa, synthetic construct
QIQLVESGGGLVKPGGSLRLSCAVSGFSITTTGYHWNWIRQAPGKGLEWVGYIYSSGSTSYNPSLKSRFTISRDTAKNSFYLQMNSLRAEDTAVYYCARGDWHYFDYWGQGTMVTVSS

SEQ ID NO: 7302 - protein, 118 aa, synthetic construct; identical to SEQ ID NO: 1

SEQ ID NO: 7303 - protein, 118 aa, synthetic construct
EIQLVESGGGLVQPGGSLRLSCAVSGFSITTTGYHWNWVRQAPGKGLEWVGYIYSSGSTSYNPSLKSRFTISRDTAKNSFYLQMNSLRAEDTAVYYCARGDWHYFDYWGQGTMVTVSS

SEQ ID NO: 7304 - protein, 118 aa, synthetic construct
QIQLVQSGAEVKKPGASVKVSCKVSGFSITTTGYHWNWVRQAPGQGLEWMGYIYSSGSTSYNPSLKSRVTMTRDTSTNTFYMELSSLRSEDTAVYYCARGDWHYFDYWGQGTMVTVSS

SEQ ID NO: 7305 - protein, 107 aa, synthetic construct; identical to SEQ ID NO: 14

SEQ ID NO: 7306 - protein, 107 aa, synthetic construct
SSETTQPHSVSVATAQMARITCSGEKLSDKYVHWYQQKPGQDPVMVIYENDRRPSGIPERFSGSNPGNTATLTISRIEAGDEADYFCQFWDSTNSAVFGGGTQLTVL

SEQ ID NO: 7307 - protein, 107 aa, synthetic construct
QSVTTQPPSASGTPGQRVTISCSGEKLSDKYVHWYQQLPGTAPKMLIYENDRRPSGVPDRFSGSNSGNSASLAISGLRSEDEADYFCQFWDSTNSAVFGGGTQLTVL

SEQ ID NO: 7308 - protein, 107 aa, synthetic construct
QSVTTQPPSVSGAPGQRVTISCSGEKLSDKYVHWYQQLPGTAPKMLIYENDRRPSGVPDRFSGSNSGNSASLAITGLQAEDEADYFCQFWDSTNSAVFGGGTQLTVL

SEQ ID NO: 7309 - protein, 108 aa, synthetic construct; identical to SEQ ID NO: 13

SEQ ID NO: 7310 - protein, 245 aa, synthetic construct
EIQLLESGGGLVQPGGSLRLSCAVSGFSITTTGYHWNWVRQAPGKGLEWVGYIYSSGSTSYNPSLKSRFTISRDTSKNTFYLQMNSLRAEDTAVYYCARGDWHYFDYWGQGTMVTVSSGGGGSGGGGSGGGGSGGGGSSSETTQPPSVSVSPGQTASITCSGEKLSDKYVHWYQQKPGQSPVMVIYENDRRPSGIPERFSGSNSGNTATLTISGTQAMDEADYFCQFWDSTNSAVFGGGTQLTVL

SEQ ID NO: 7311 - protein, 246 aa, synthetic construct
EIQLLESGGGLVQPGGSLRLSCAVSGFSITTTGYHWNWVRQAPGKGLEWVGYIYSSGSTSYNPSLKSRFTISRDTSKNTFYLQMNSLRAEDTAVYYCARGDWHYFDYWGQGTMVTVSSGGGGSGGGGSGGGGSGGGGSDSVTTQSPLSLPVTLGQPASISCSGEKLSDKYVHWYQQRPGQSPRMLIYENDRRPSGVPDRFSGSNSGNDATLKISRVEAEDVGVYFCQFWDSTNSAVFGGGTKVEIK

SEQ ID NO: 7312 - protein, 32 aa, synthetic construct
QIQLQESGPGLVKPSQSLSLSCSVTGFSINTG

SEQ ID NO: 7313 - protein, 5 aa, synthetic construct
GYHWN

SEQ ID NO: 7314 - protein, 14 aa, synthetic construct
WIRQFPGKKVEWMG

SEQ ID NO: 7315 - protein, 8 aa, synthetic construct
GDWHYFDY

SEQ ID NO: 7316 - protein, 11 aa, synthetic construct
WGQGTMVAVSS

SEQ ID NO: 7317 - protein, 32 aa, synthetic construct
QIQLQESGPGLVKPSQSLSLTCSVTGFSINTG

SEQ ID NO: 7318 - protein, 16 aa, synthetic construct
YIYSSGSTRYNPSLKS

SEQ ID NO: 7319 - protein, 32 aa, synthetic construct
RFSITRDTSKNQFFLQLNSVTTEDTATYYCTR

SEQ ID NO: 7320 - protein, 22 aa, synthetic construct
SYTLTQPPLVSVALGQKATIIC

SEQ ID NO: 7321 - protein, 10 aa, synthetic construct
HCWDSTNSAV

SEQ ID NO: 7322 - protein, 32 aa, synthetic construct
QIQLQESGPGLVKPSQSLSLSCSVTGFSITTT

SEQ ID NO: 7323 - protein, 32 aa, synthetic construct
RFSITRDTSKNQFFLQLNSVTTEDTATYYCAR

SEQ ID NO: 7324 - protein, 11 aa, synthetic construct
WGPGTMVTVSS

SEQ ID NO: 7325 - protein, 22 aa, synthetic construct
SFTLTQPPLVSVAVGQVATITC

SEQ ID NO: 7326 - protein, 11 aa, synthetic construct
SGEKLSDKYVH

SEQ ID NO: 7327 - protein, 7 aa, synthetic construct
ENDRRPS

SEQ ID NO: 7328 - protein, 32 aa, synthetic construct
GIPDQFSGSNSGNIASLTISKAQAGDEADYFC

SEQ ID NO: 7329 - protein, 10 aa, synthetic construct
QFWDSTNSAV

SEQ ID NO: 7330 - protein, 32 aa, synthetic construct
QIQLQESGPGLVKPSQTLSLTCTVSGFSITTT

SEQ ID NO: 7331 - protein, 32 aa, synthetic construct
QIQLVESGGGLVKPGGSLRLSCAVSGFSITTT

SEQ ID NO: 7332 - protein, 32 aa, synthetic construct
EIQLLESGGGLVQPGGSLRLSCAVSGFSITTT

SEQ ID NO: 7333 - protein, 32 aa, synthetic construct
EIQLVESGGGLVQPGGSLRLSCAVSGFSITTT

SEQ ID NO: 7334 - protein, 32 aa, synthetic construct
QIQLVQSGAEVKKPGASVKVSCKVSGFSITTT

SEQ ID NO: 7335 - protein, 22 aa, synthetic construct
SSETTQPPSVSVSPGQTASITC

SEQ ID NO: 7336 - protein, 32 aa, synthetic construct; identical to SEQ ID NO: 57

SEQ ID NO: 7337 - protein, 32 aa, synthetic construct
GIPERFSGSNPGNTATLTISRIEAGDEADYFC

SEQ ID NO: 7338 - protein, 32 aa, synthetic construct
GVPDRFSGSNSGNSASLAISGLRSEDEADYFC

SEQ ID NO: 7339 - protein, 32 aa, synthetic construct
GVPDRFSGSNSGNSASLAITGLQAEDEADYFC

SEQ ID NO: 7340 - protein, 23 aa, synthetic construct
DSVTTQSPLSLPVTLGQPASISC

SEQ ID NO: 7341 - protein, 15 aa, synthetic construct
WYQQRPGQSPRMLIY

SEQ ID NO: 7342 - protein, 32 aa, synthetic construct; identical to SEQ ID NO: 29

SEQ ID NO: 7343-7370 - skipped (28 entries)

SEQ ID NO: 7371 - protein, 32 aa, synthetic construct
QIQLQESGPGLVKPSETLSLTCTVSGFSINTG

SEQ ID NO: 7372 - protein, 32 aa, synthetic construct
QIQLQESGPGLVKPSQTLSLTCTVSGFSINTG

SEQ ID NO: 7373 - protein, 32 aa, synthetic construct
EIQLLESGGGLVQPGGSLRLSCAVSGFSINTG

SEQ ID NO: 7374 - protein, 32 aa, synthetic construct
QIQLVQSGAEVKKPGSSVKVSCKVSGFSINTG

SEQ ID NO: 7375 - protein, 32 aa, synthetic construct
EIQLVESGGGLVQPGGSLRLSCAVSGFSINTG

SEQ ID NO: 7376 - protein, 32 aa, synthetic construct
QIQLVQSGAEVKKPGASVKVSCKVSGFSINTG

SEQ ID NO: 7377 - protein, 32 aa, synthetic construct
QIQLVESGGGLVKPGGSLRLSCAVSGFSINTG

SEQ ID NO: 7378 - protein, 32 aa, synthetic construct
EIQLVQSGAEVKKPGATVKISCKVSGFSINTG

SEQ ID NO: 7379-7384 - skipped (6 entries)

SEQ ID NO: 7385 - protein, 16 aa, synthetic construct
YIYSSGTTKYNPSLKS

SEQ ID NO: 7386 - protein, 246 aa, synthetic construct
EIQLLESGGGLVQPGGSLRLSCAVSGFSITTTGYHWNWVRQAPGKGLEWVGYIYSSGSTSYNPSLKSRFTISRDTSKNTFYLQMNSLRAEDTAVYYCARGDWHYFDYWGQGTMVTVSSGGGGSGGGGSGGGGSGGGGSDSVTTQSPLSLPVTLGQPASISCSGEKLSDKYVHWYQQRPGQSPRMLIYENDRRPSGVPDRFSGSNSGNDATLKISRVEAEDVGVYFCQFWASTNSAVFGGGTKVEIK

SEQ ID NO: 7387 - protein, 245 aa, synthetic construct
EIQLLESGGGLVQPGGSLRLSCAVSGFSITTTGYHWNWVRQAPGKGLEWVGYIYSSGSTSYNPSLKSRFTISRDTSKNTFYLQMNSLRAEDTAVYYCARGDWHYFDYWGQGTMVTVSSGGGGSGGGGSGGGGSGGGGSSSETTQPPSVSVSPGQTASITCSGEKLSDKYVHWYQQKPGQSPVMVIYENDRRPSGIPERFSGSNSGNTATLTISGTQAMDEADYFCQFWASTNSAVFGGGTQLTVL

SEQ ID NO: 7388 - protein, 245 aa, synthetic construct
EIQLLESGGGLVQPGGSLRLSCAVSGFSITTTGYHWNWVRQAPGKGLEWVGYIYSSGSTSYNPSLKSRFTISRDTSKNTFYLQMNSLRAEDTAVYYCARGDWHYFDYWGQGTMVTVSSGGGGSGGGGSGGGGSGGGGSSSETTQPPSVSVSPGQTASITCSGEKLSDKYVHWYQQKPGQSPVMVIYENDRRPSGIPERFSGSNSGNTATLTISGTQAMDEADYFCQFWDSTASAVFGGGTQLTVL

SEQ ID NO: 7389 - protein, 246 aa, synthetic construct
EIQLLESGGGLVQPGGSLRLSCAVSGFSITTTGYHWNWVRQAPGKGLEWVGYIYSSGSTSYAPSLKSRFTISRDTSKNTFYLQMNSLRAEDTAVYYCARGDWHYFDYWGQGTMVTVSSGGGGSGGGGSGGGGSGGGGSDSVTTQSPLSLPVTLGQPASISCSGEKLSDKYVHWYQQRPGQSPRMLIYENDRRPSGVPDRFSGSNSGNDATLKISRVEAEDVGVYFCQFWDSTNSAVFGGGTKVEIK

SEQ ID NO: 7390 - protein, 245 aa, synthetic construct
EIQLLESGGGLVQPGGSLRLSCAVSGFSITTTGYHWNWVRQAPGKGLEWVGYIYSSGSTSYAPSLKSRFTISRDTSKNTFYLQMNSLRAEDTAVYYCARGDWHYFDYWGQGTMVTVSSGGGGSGGGGSGGGGSGGGGSSSETTQPPSVSVSPGQTASITCSGEKLSDKYVHWYQQKPGQSPVMVIYENDRRPSGIPERFSGSNSGNTATLTISGTQAMDEADYFCQFWDSTNSAVFGGGTQLTVL

SEQ ID NO: 7391 - protein, 246 aa, synthetic construct
EIQLLESGGGLVQPGGSLRLSCAVSGFSITTTGYHWNWVRQAPGKGLEWVGYIYSSGSTSYAPSLKSRFTISRDTSKNTFYLQMNSLRAEDTAVYYCARGDWHYFDYWGQGTMVTVSSGGGGSGGGGSGGGGSGGGGSDSVTTQSPLSLPVTLGQPASISCSGEKLSDKYVHWYQQRPGQSPRMLIYENDRRPSGVPDRFSGSNSGNDATLKISRVEAEDVGVYFCQFWASTASAVFGGGTKVEIK

SEQ ID NO: 7392 - protein, 245 aa, synthetic construct
EIQLLESGGGLVQPGGSLRLSCAVSGFSITTTGYHWNWVRQAPGKGLEWVGYIYSSGSTSYAPSLKSRFTISRDTSKNTFYLQMNSLRAEDTAVYYCARGDWHYFDYWGQGTMVTVSSGGGGSGGGGSGGGGSGGGGSSSETTQPPSVSVSPGQTASITCSGEKLSDKYVHWYQQKPGQSPVMVIYENDRRPSGIPERFSGSNSGNTATLTISGTQAMDEADYFCQFWASTASAVFGGGTQLTVL

SEQ ID NO: 7393 - protein, 7 aa, synthetic construct
ENDRRPS

SEQ ID NO: 7394 - protein, 32 aa, synthetic construct; identical to SEQ ID NO: 29

SEQ ID NO: 7395 - protein, 10 aa, synthetic construct
QFWASTNSAV

SEQ ID NO: 7396 - protein, 10 aa, synthetic construct
FGGGTKVEIK

SEQ ID NO: 7397 - protein, 9 aa, synthetic construct
ITTTGYHWN

SEQ ID NO: 7398 - protein, 14 aa, synthetic construct
WVRQAPGKGLEWVG

SEQ ID NO: 7399 - protein, 16 aa, synthetic construct
YIYSSGSTSYAPSLKS

SEQ ID NO: 7400 - protein, 32 aa, synthetic construct; identical to SEQ ID NO: 22

What is claimed is:

1-45. (canceled)

46. A composition comprising an antibody molecule that binds to NKp30, wherein the antibody molecule comprises:
(a)(i) a heavy chain variable region (VH) comprising a heavy chain complementarity determining region 1 (VHCDR1) comprising the sequence of SEQ ID NO: 19, a heavy chain complementarity determining region 2 (VHCDR2) comprising the sequence of SEQ ID NO: 21, and a heavy chain complementarity determining region 3 (VHCDR3) comprising the sequence of SEQ ID NO: 23; and
(ii) a light chain variable region (VL) comprising a light chain complementarity determining region 1 (VLCDR1) comprising the sequence of SEQ ID NO: 26, a light chain complementarity determining region 2 (VLCDR2) comprising the sequence of SEQ ID NO: 28, and a light chain complementarity determining region 3 (VLCDR3) comprising the sequences of SEQ ID NO: 30, SEQ ID NO: 7395, or SEQ ID NO: 113; or
(b)(i) a VH comprising a VHCDR1 comprising the sequence of SEQ ID NO: 19, a VHCDR2 comprising the sequence of SEQ ID NO: 7399, and a VHCDR3 comprising the sequence of the sequence of SEQ ID NO: 23; and
(ii) a VL comprising a VLCDR1 comprising the sequence of SEQ ID NO: 26, a VLCDR2 comprising the sequence of SEQ ID NO: 28, and a VLCDR3 comprising the sequences of SEQ ID NO: 30, SEQ ID NO: 7395, SEQ ID NO: 86, or SEQ ID NO: 113.

47. The composition of claim 46, wherein the antibody molecule comprises:
(i) a VH comprising an amino acid sequence having at least 80% sequence identity to the sequence of SEQ ID NO: 1 or SEQ ID NO: 2;
(ii) a VL comprising an amino acid sequence having at least 80% sequence identity to any one sequence selected from the group consisting of SEQ ID NOs: 9-16; or
(iii) any combination thereof.

48. The composition of claim 46, wherein the antibody molecule comprises:
(a) a VH comprising the amino acid sequence of SEQ ID NO: 1, and a VL comprising any one of the amino acid sequences selected from the group consisting of SEQ ID NOs: 9-12, 15, and 16; or
(b) a VH comprising the amino acid sequence of SEQ ID NO: 2, and a VL comprising any one of the amino acid sequences selected from the group consisting of SEQ ID NOs: 9-16.

49. The composition of claim 46, wherein the antibody molecule comprises an amino acid sequence having at least 80% sequence identity to any one sequence selected from the group consisting of SEQ ID NOs: 17 and 7386-7392.

50. The composition of claim 46, wherein the antibody molecule comprises any one amino acid sequence selected from the group consisting of SEQ ID NOs: 17 and 7386-7392.

51. The composition of claim 46, wherein the antibody molecule is a full antibody or an antigen-binding fragment thereof, a bivalent antibody, or a bispecific antibody,
wherein the antigen-binding fragment is a Fab, F(ab′)2, Fv, a single chain Fv, a single domain antibody, a diabody, or a camelid antibody.

52. The composition of claim 46, wherein the antibody molecule is a multifunctional antibody molecule, a multispecific antibody molecule, or a combination thereof.

53. The composition of claim 52, wherein the antibody molecule comprises:
(i) an immunoglobulin heavy chain constant region selected from the group consisting of IgG1 heavy chain constant region or fragment thereof, IgG2 heavy chain constant region or fragment thereof, IgG3 heavy chain constant region or fragment thereof, and IgG4 heavy chain constant region or fragment thereof;
(ii) a light chain constant region selected from the group consisting of the kappa light chain constant region or fragment thereof, and the lambda light chain constant region or fragment thereof; or
(iii) any combination thereof.

54. The composition of claim 53, wherein the immunoglobulin heavy chain constant region is altered to increase or decrease one or more of: Fc receptor binding, antibody glycosylation, the number of cysteine residues, effector cell function, or complement function.

55. The composition of claim 53, wherein the antibody molecule comprises a first immunoglobulin heavy chain constant region and a second immunoglobulin heavy chain constant region,
wherein the first immunoglobulin heavy chain constant region comprises a first Fc region, and the second immunoglobulin heavy chain constant region comprises a second Fc region, and
wherein dimerization of the first immunoglobulin heavy chain constant region and the second immunoglobulin heavy chain constant region is enhanced by providing an Fc interface of the first Fc region and the second Fc region with one or more of: a paired cavity-protuberance, an electrostatic interaction, or a strand-exchange, such that a greater ratio of heteromultimer:homomultimer forms relative to a non-engineered interface.

56. The composition of claim 55, wherein the first Fc region comprises an amino acid substitution selected from the group consisting of T366S, L368A, Y407V, and any combination thereof, and the second Fc region comprises an amino acid substitution of T366W, or the first Fc region comprises an amino acid substitution of T366W, and the second Fc region comprises an amino acid substitution selected from the group consisting of T366S, L368A, Y407V, and any combination thereof.

57. The composition of claim 52, wherein the antibody molecule further comprises a cytokine molecule.

58. The composition of claim 57, wherein the cytokine molecule is interleukin-2 (IL-2) molecule or functional variant thereof, interleukin-12 (IL-12) molecule or functional variant thereof, interleukin-15 (IL-15) molecule or functional variant thereof, interleukin-18 (IL-18) molecule or functional variant thereof, interleukin-21 (IL-21) molecule or functional variant thereof, interleukin-7 (IL-7) molecule or functional variant thereof, or interferon gamma molecule or functional variant thereof.

59. The composition of claim 52, wherein the antibody molecule further comprises a T cell engager.

60. The composition of claim 52, wherein the antibody molecule further comprises a targeting moiety selected from the group consisting of a tumor targeting moiety, a targeting moiety that targets an autoreactive T cell, and a targeting moiety that targets an infected cell.

61. The composition of claim 60, wherein:
(i) the targeting moiety that targets an autoreactive T cell binds to an antigen present on the surface of the autoreactive T cell, and
wherein the antigen present on the surface of the autoreactive T cell is associated with an inflammatory or autoimmune disorder; or
(ii) the targeting moiety that targets the infected cell binds to an antigen associated with a viral infection or a bacterial infection.

62. The composition of claim 61, wherein the antigen present on the surface of the autoreactive T cell is selected from the group consisting of CD3, TCRα, TCRβ, TCRγ, TCRζ, ICOS, CD28, CD27, HVEM, LIGHT, CD40, 4-1BB, OX40, DR3, GITR, CD30, TIM1, SLAM, CD2, and CD226.

63. The composition of claim 52, wherein the antibody molecule comprises one or more of:
(a) a tumor targeting moiety;
(b) a cytokine molecule;
(c) a T cell engager; or
(d) a stromal modifying moiety.

64. A recombinant polynucleotide comprising a sequence encoding the antibody molecule of the composition of claim 46.

65. A method of making the antibody molecule of the composition of claim 46, comprising culturing a host cell comprising a recombinant polynucleotide comprising a sequence encoding the antibody molecule of the composition under conditions suitable for gene expression and/or homo- or heterodimerization.

66. A pharmaceutical composition comprising the composition of claim 46, and a pharmaceutically acceptable carrier, excipient, diluent, or stabilizer.

67. A method of treating a disease or disorder in a subject in need thereof comprising administering to the subject an effective amount of the composition of claim 46,
wherein the disease or disorder is cancer, an autoimmune disorder or an inflammatory disorder, or an infectious disorder; and
wherein the administering is effective to treat the disease or disorder in the subject.

68. The method of claim 67, wherein:
(a) the cancer is a solid tumor cancer, a hematological cancer, or a metastatic cancer; or
(b) the infectious disorder is associated with a viral infection or a bacterial infection.

69. The method of claim 68, wherein the solid tumor cancer is one or more of pancreatic cancer, breast cancer, colorectal cancer, lung cancer, skin cancer, ovarian cancer, or liver cancer.
